(19) United States
(12) Patent Application Publication
(10) Pub. No.: US 2022/0313845 A1
(43) Pub. Date: Oct. 6, 2022

(54) ANTIGEN-BINDING PROTEIN CONSTRUCTS AND USES THEREOF

(71) Applicant: Mythic Therapeutics, Inc., Waltham, MA (US)

(72) Inventors: Alexander J. Nichols, Lincoln, MA (US); Brian P. Fiske, Cambridge, MA (US); Nimish Gera, Waltham, MA (US)

(73) Assignee: Mythic Therapeutics, Inc., Waltham, MA (US)

(21) Appl. No.: 17/616,804

(22) PCT Filed: Jun. 5, 2020
(86) PCT No.: PCT/US2020/036495

§ 371 Date: Dec. 6, 2021

Related U.S. Application Data
(60) Provisional application No. 62/888,384, filed on Aug. 16, 2019.
(60) Provisional application No. 62/858,932, filed on Jun. 7, 2019.

(51) Int. Cl. A61K 51/10; A61K 47/68; A61P 35/00

(52) U.S. Cl. CPC A61K 51/1018; A61K 47/6843; A61P 35/00

(57) ABSTRACT

Provided herein are antigen-binding protein constructs capable of specifically binding DLL3 or an epitope of DLL3 presented on the surface of a target mammalian cell, wherein said antigen binding is pH-dependent. Provided are also uses of said antigen-binding protein constructs.

### CROSS-REFERENCE TO RELATED APPLICATIONS

[0001] This application claims priority to U.S. Provisional Patent Application 62/858,932 filed on Jun. 7, 2019 and U.S. Provisional Patent Application 62/888,384 filed on Aug. 16, 2019. The contents of each of these applications are incorporated herein by reference in their entireties.

### TECHNICAL FIELD

[0002] The present disclosure relates to the field of biotechnology, and more specifically, to antigen-binding molecules.

### BACKGROUND

[0003] Antibody-drug-conjugates have been designed to combat a variety of diseases. One particular advantage of this approach is the ability for antibody-drug conjugates to have cytostatic or cytotoxic effects. Despite years of development, improved antibody-drug conjugates are desired.

### SUMMARY

[0004] The present invention is based on the concept that antigen-binding protein constructs can be generated that display enhanced efficacy (e.g., one or more of an increase (e.g., a detectable increase) in toxin liberation in a target mammalian cell, an increase (e.g., a detectable increase) in target mammalian cell killing, and an increase (e.g., a detectable increase) in endolysosomal delivery).

[0005] Provided herein are pharmaceutical compositions including an effective amount of an antigen-binding protein construct (ABPC) including a first antigen-binding domain that is capable of specifically binding DLL3 or an epitope of DLL3 presented on the surface of a target mammalian cell, where (a) the dissociation rate of the first antigen-binding domain at a pH of about 4.0 to about 6.5 is faster than the dissociation rate at a pH of about 7.0 to about 8.0; or (b) the dissociation constant (KD) of the first antigen-binding domain at a pH of about 4.0 to about 6.5 is greater than the KD at a pH of about 7.0 to about 8.0.

[0006] In some embodiments of any of the pharmaceutical compositions described herein, the ABPC is degraded in the target mammalian cell following internalization of the ABPC by the target mammalian cell.

[0007] In some embodiments of any of the pharmaceutical compositions described herein, the ABPC includes a conjugated toxin, radioisotope, drug, or small molecule.

[0008] Also provided herein are pharmaceutical compositions including an effective amount of an antigen-binding protein construct (ABPC) including, a first antigen-binding domain that is capable of specifically binding DLL3 or an epitope of DLL3 presented on the surface of a target mammalian cell and a conjugated toxin, radioisotope, drug, or small molecule, where (a) the dissociation rate of the first antigen-binding domain at a pH of about 4.0 to about 6.5 is faster than the dissociation rate at a pH of about 7.0 to about 8.0 or the dissociation constant (KD) of the first antigen-binding domain at a pH of about 4.0 to about 6.5 is greater than the KD at a pH of about 7.0 to about 8.0 and (b) the composition provides for one or more of an increase in toxin liberation in the target mammalian cell as compared to a composition including the same amount of a control ABPC an increase in target mammalian cell killing as compared to a composition including the same amount of a control ABPC and an increase in endolysosomal delivery in the target mammalian cell as compared to a composition including the same amount of a control ABPC.

[0009] In some embodiments of any of the pharmaceutical compositions described herein, the first antigen-binding domain includes one of (a) though (g): (a) a heavy chain variable domain of rovalpituzumab with one or more amino acids substituted with a histidine, where the heavy chain variable domain of rovalpituzumab includes SEQ ID NO: 1; and/or a light chain variable domain of rovalpituzumab with one or more amino acids substituted with a histidine, where the light chain variable domain of rovalpituzumab includes SEQ ID NO: 2; (b) a heavy chain variable domain of SC16.4 with one or more amino acids substituted with a histidine, where the heavy chain variable domain of SC16.4 includes SEQ ID NO: 119; and/or a light chain variable domain of SC16.4 with one or more amino acids substituted with a histidine, where the light chain variable domain of SC16.4 includes SEQ ID NO: 120; (c) a heavy chain variable domain of SC16.13 with one or more amino acids substituted with a histidine, where the heavy chain variable domain of SC16.13 includes SEQ ID NO: 236; and/or a light chain variable domain of SC16.13 with one or more amino acids substituted with a histidine, where the light chain variable domain of SC16.13 includes SEQ ID NO: 237; (d) a heavy chain variable domain of SC16.15 with one or more amino acids substituted with a histidine, where the heavy chain variable domain of SC16.15 includes SEQ ID NO: 335; and/or a light chain variable domain of SC16.15 with one or more amino acids substituted with a histidine, where the light chain variable domain of SC16.15 includes SEQ ID NO: 336; (e) a heavy chain variable domain of SC16.25 with one or more amino acids substituted with a histidine, where the heavy chain variable domain of SC16.25 includes SEQ ID NO: 401; and/or a light chain variable domain of SC16.25 with one or more amino acids substituted with a histidine, where the light chain variable domain of SC16.25 includes SEQ ID NO: 402; (f) a heavy chain variable domain of SC16.34 with one or more amino acids substituted with a histidine, where the heavy chain variable domain of SC16.34 includes SEQ ID NO: 470; and/or a light chain variable domain of SC16.34 with one or more amino acids substituted with a histidine, where the light chain variable domain of SC16.34 includes SEQ ID NO: 471; and (g) a heavy chain variable domain of SC16.67 with one or more amino acids substituted with a histidine, where the heavy chain variable domain of SC16.67 includes SEQ ID NO: 537; and/or a light chain variable domain of SC16.67 with one or more amino acids substituted with a histidine, where the light chain variable domain of SC16.67 includes SEQ ID NO: 538.

[0010] In some embodiments of any of the pharmaceutical compositions described herein, the first DLL3-binding domain includes one of (a) through (g): (a) a heavy chain variable domain including a CDR1, a CDR2, and a CDR3 of SEQ ID NOs: 3-5, respectively, with collectively a total of one or more amino acid positions in SEQ ID NOs: 3-5 substituted with a histidine; and/or a light chain variable domain including a CDR1, a CDR2, and a CDR3 of SEQ ID NOs: 6-8, respectively, with collectively a total of one or more amino acid positions in SEQ ID NOs: 6-8 substituted with a histidine; (b) a heavy chain variable domain including a CDR1, a CDR2, and a CDR3 of SEQ ID NOs: 622-624, respectively, with collectively a total of one or more amino acid positions in SEQ ID NOs: 622-624 substituted with a histidine; and/or a light chain variable domain including a CDR1, a CDR2, and a CDR3 of SEQ ID NOs: 625-627, respectively, with collectively a total of one or more amino acid positions in SEQ ID NOs: 625-627 substituted with a histidine; (c) a heavy chain variable domain including a CDR1, a CDR2, and a CDR3 of SEQ ID NOs: 628-630, respectively, with collectively a total of one or more amino acid positions in SEQ ID NOs: 628-630 substituted with a histidine; and/or a light chain variable domain including a CDR1, a CDR2, and a CDR3 of SEQ ID NOs: 631-633, respectively, with collectively a total of one or more amino acid positions in SEQ ID NOs: 631-633 substituted with a histidine; (d) a heavy chain variable domain including a CDR1, a CDR2, and a CDR3 of SEQ ID NOs: 634-636, respectively, with collectively a total of one or more amino acid positions in SEQ ID NOs: 634-636 substituted with a histidine; and/or a light chain variable domain including a CDR1, a CDR2, and a CDR3 of SEQ ID NOs: 637-639, respectively, with collectively a total of one or more amino acid positions in SEQ ID NOs: 637-639 substituted with a histidine; (e) a heavy chain variable domain including a CDR1, a CDR2, and a CDR3 of SEQ ID NOs: 640-642, respectively, with collectively a total of one or more amino acid positions in SEQ ID NOs: 640-642 substituted with a histidine; and/or a light chain variable domain including a CDR1, a CDR2, and a CDR3 of SEQ ID NOs: 643-645, respectively, with collectively a total of one or more amino acid positions in SEQ ID NOs: 643-645 substituted with a histidine; (f) a heavy chain variable domain including a CDR1, a CDR2, and a CDR3 of SEQ ID NOs: 646-648, respectively, with collectively a total of one or more amino acid positions in SEQ ID NOs: 646-648 substituted with a histidine; and/or a light chain variable domain including a CDR1, a CDR2, and a CDR3 of SEQ ID NOs: 649-651, respectively, with collectively a total of one or more amino acid positions in SEQ ID NOs: 649-651 substituted with a histidine; and (g) a heavy chain variable domain including a CDR1, a CDR2, and a CDR3 of SEQ ID NOs: 652-654, respectively, with collectively a total of one or more amino acid positions in SEQ ID NOs: 652-654 substituted with a histidine; and/or a light chain variable domain including a CDR1, a CDR2, and a CDR3 of SEQ ID NOs: 655-657, respectively, with collectively a total of one or more amino acid positions in SEQ ID NOs: 655-657 substituted with a histidine.

[0011] In some embodiments of any of the pharmaceutical compositions described herein, the first antigen-binding domain includes one of (a) through (g): (a) a heavy chain variable domain that is at least 90% identical to SEQ ID NO: 1, where the heavy chain variable domain includes a histidine at one or more positions in SEQ ID NO: 1 selected from the group consisting of: 27, 29, 31, 32, 34, 35, 50, 53, 54, 55, 58, 97, 98, 101, 103, 105, and 106; and/or a light chain variable domain that is at least 90% identical to SEQ ID NO: 2, where the light chain variable domain includes a histidine at one or more positions in SEQ ID NO: 2 selected from the group consisting of: 25, 26, 29, 32, 33, 34, 51, 54, 89, 90, 93, 94, 95, and 96; (b) a heavy chain variable domain that is at least 90% identical to SEQ ID NO: 119, where the heavy chain variable domain includes a histidine at one or more positions in SEQ ID NO: 119 selected from the group consisting of: 32, 50, 52, 53, 57, 58, 59, 60, 62, 64, 65, 97, 98, 99, 100, 102, 104, and 105; and/or a light chain variable domain that is at least 90% identical to SEQ ID NO: 120, where the light chain variable domain includes a histidine at one or more positions in SEQ ID NO: 120 selected from the group consisting of: 29, 32, 34, 91, 92, 93, 94 and 96; (c) a heavy chain variable domain that is at least 90% identical to SEQ ID NO: 236, where the heavy chain variable domain includes a histidine at one or more positions in SEQ ID NO: 236 selected from the group consisting of: 27, 29, 31, 33, 34, 35, 36, 37, 54, 55, 56, 58, 60, 98, 100, 102, 106, 108, and 110; and/or a light chain variable domain that is at least 90% identical to SEQ ID NO: 237, where the light chain variable domain includes a histidine at one or more positions in SEQ ID NO: 237 selected from the group consisting of 25, 29, 32, 33, 49, 50, 90, 91, 93, and 95; (d) a heavy chain variable domain that is at least 90% identical to SEQ ID NO: 335, where the heavy chain variable domain includes a histidine at one or more positions in SEQ ID NO: 335 selected from the group consisting of: 27, 32, 33, 34, 50, 98, 101, 102, 103, 104, and 105; and/or a light chain variable domain that is at least 90% identical to SEQ ID NO: 336, where the light chain variable domain includes a histidine at one or more positions in SEQ ID NO: 336 selected from the group consisting of: 27, 29, 32, 34, 52, 53, 89, 90, 91, 92, 93, 94, and 96; (e) a heavy chain variable domain that is at least 90% identical to SEQ ID NO: 401, where the heavy chain variable domain includes a histidine at one or more positions in SEQ ID NO: 401 selected from the group consisting of: 27, 101, 103, 104, 108, and 109; and/or a light chain variable domain that is at least 90% identical to SEQ ID NO: 402, where the light chain variable domain includes a histidine at one or more positions in SEQ ID NO: 402 selected from the group consisting of: 30 and 31; (f) a heavy chain variable domain that is at least 90% identical to SEQ ID NO: 470, where the heavy chain variable domain includes a histidine at one or more positions in SEQ ID NO: 470 selected from the group consisting of 24, 27, 29, 32, 34, 35, 50, 51, 53, 54, 56, 58, 59, 60, 63, 98, 101, 103, 105, 106, and 107; and/or a light chain variable domain that is at least 90% identical to SEQ ID NO: 471, where the light chain variable domain includes a histidine at one or more positions in SEQ ID NO: 471 selected from the group consisting of: 29, 32, 33, 34, 50, 51, 53, 55, 89, 92, 94, 96 and 97; and (g) a heavy chain variable domain that is at least 90% identical to SEQ ID NO: 537, where the heavy chain variable domain includes a histidine at one or more positions in SEQ ID NO: 537 selected from the group consisting of: 26, 29, 31, 32, 53, 54, 57, 58, 59, 65, 67, 68, 103, 104, and 106; and/or a light chain variable domain that is at least 90% identical to SEQ ID NO: 538, where the light chain variable domain includes a histidine at one or more positions in SEQ ID NO: 538 selected from the group consisting of: 28, 34, 53, 93, 94, and 98.

[0012] In some embodiments of any of the pharmaceutical compositions described herein, the first antigen-binding domain includes one of (a) through (g): (a) a light chain variable domain of SEQ ID NO: 2, SEQ ID NO: 55, SEQ ID NO: 56, SEQ ID NO: 59, SEQ ID NO: 62, SEQ ID NO: 63, SEQ ID NO: 64, SEQ ID NO: 65, SEQ ID NO: 66, SEQ ID NO: 69, SEQ ID NO: 72, SEQ ID NO: 73, SEQ ID NO: 76, SEQ ID NO: 77, SEQ ID NO: 78, SEQ ID NO: 79, SEQ ID NO: 99, SEQ ID NO: 100, SEQ ID NO: 101, SEQ ID NO: 102, SEQ ID NO: 103, SEQ ID NO: 104, SEQ ID NO: 105, SEQ ID NO: 106, SEQ ID NO: 107, SEQ ID NO: 108, SEQ ID NO: 109, SEQ ID NO: 110, SEQ ID NO: 111, SEQ ID NO: 112, SEQ ID NO: 113, SEQ ID NO: 114, SEQ ID NO: 115, SEQ ID NO: 116, SEQ ID NO: 117, or SEQ ID NO: 118, and/or a heavy chain variable domain of SEQ ID NO: 1, SEQ ID NO: 17, SEQ ID NO: 19, SEQ ID NO: 21, SEQ ID NO: 22, SEQ ID NO: 24, SEQ ID NO: 25, SEQ ID NO: 26, SEQ ID NO: 29, SEQ ID NO: 30, SEQ ID NO: 31, SEQ ID NO: 34, SEQ ID NO: 43, SEQ ID NO: 44, SEQ ID NO: 47, SEQ ID NO: 49, SEQ ID NO: 51, SEQ ID NO: 52, SEQ ID NO: 81, SEQ ID NO: 82, SEQ ID NO: 83, SEQ ID NO: 84, SEQ ID NO: 85, SEQ ID NO: 86, SEQ ID NO: 87, SEQ ID NO: 88, SEQ ID NO: 89, SEQ ID NO: 90, SEQ ID NO: 91, SEQ ID NO: 92, SEQ ID NO: 93, SEQ ID NO: 94, SEQ ID NO: 95, SEQ ID NO: 96, SEQ ID NO: 97, or SEQ ID NO: 98, where the first antigen-binding domain does not comprise (i) a light chain variable domain of SEQ ID NO: 2 and a heavy chain variable domain of SEQ ID NO: 1; (ii) a light chain variable domain of SEQ ID NO: 2 and heavy chain variable domain that is not one of SEQ ID NOs: 17, 19, 21, 22, 24-26, 29-31, 34, 43, 44, 47, 49, 51, 52, and 81-98; or (iii) a heavy chain variable domain of SEQ ID NO: 1 and a light chain variable domain that is not one of SEQ ID NOs: 55, 56, 59, 62-66, 69, 72, 73, 76-79, and 99-118; (b) a light chain variable domain of SEQ ID NO: 120, SEQ ID NO: 163, SEQ ID NO: 166, SEQ ID NO: 168, SEQ ID NO: 178, SEQ ID NO: 179, SEQ ID NO: 180, SEQ ID NO: 181, SEQ ID NO: 183, SEQ ID NO: 226, SEQ ID NO: 227, SEQ ID NO: 228, SEQ ID NO: 229, SEQ ID NO: 230, SEQ ID NO: 231, SEQ ID NO: 232, SEQ ID NO: 233, SEQ ID NO: 234, or SEQ ID NO: 235, and/or a heavy chain variable domain of SEQ ID NO: 119, SEQ ID NO: 127, SEQ ID NO: 130, SEQ ID NO: 131, SEQ ID NO: 133, SEQ ID NO: 134, SEQ ID NO: 138, SEQ ID NO: 139, SEQ ID NO: 140, SEQ ID NO: 141, SEQ ID NO: 143, SEQ ID NO: 145, SEQ ID NO: 146, SEQ ID NO: 148, SEQ ID NO: 149, SEQ ID NO: 150, SEQ ID NO: 151, SEQ ID NO: 153, SEQ ID NO: 155, SEQ ID NO: 156; SEQ ID NO: 185, SEQ ID NO: 186, SEQ ID NO: 187, SEQ ID NO: 188, SEQ ID NO: 189, SEQ ID NO: 190, SEQ ID NO: 191, SEQ ID NO: 192, SEQ ID NO: 193, SEQ ID NO: 194, SEQ ID NO: 195, SEQ ID NO: 196, SEQ ID NO: 197, SEQ ID NO: 198, SEQ ID NO: 199, SEQ ID NO: 200, SEQ ID NO: 201, SEQ ID NO: 202, SEQ ID NO: 203, SEQ ID NO: 204, SEQ ID NO: 205, SEQ ID NO: 206, SEQ ID NO: 207, SEQ ID NO: 208, SEQ ID NO: 209, SEQ ID NO: 210, SEQ ID NO: 211, SEQ ID NO: 212, SEQ ID NO: 213, SEQ ID NO: 214, SEQ ID NO: 216, SEQ ID NO: 217, SEQ ID NO: 218, SEQ ID NO: 220, SEQ ID NO: 221, or SEQ ID NO: 223, where the first antigen-binding domain does not comprise (i) a light chain variable domain of SEQ ID NO: 120 and a heavy chain variable domain of SEQ ID NO: 119; (ii) a light chain variable domain of SEQ ID NO: 120 and heavy chain variable domain that is not one of SEQ ID NOs: 127, 130, 131, 133, 134, 138-141, 143, 145, 146, 148-151, 153, 155, 156, 185-214, 216-218, 220, 221, and 223; or (iii) a heavy chain variable domain of SEQ ID NO: 119 and a light chain variable domain that is not one of SEQ ID NOs: 163, 166, 168, 178-181, 183, and 226-235; (c) a light chain variable domain of SEQ ID NO: 237, SEQ ID NO: 283, SEQ ID NO: 287, SEQ ID NO: 290, SEQ ID NO: 291, SEQ ID NO: 292, SEQ ID NO: 293, SEQ ID NO: 301, SEQ ID NO: 302, SEQ ID NO: 304, SEQ ID NO: 306, or SEQ ID NO: 334, and/or a heavy chain variable domain of SEQ ID NO: 236, SEQ ID NO: 239, SEQ ID NO: 241, SEQ ID NO: 243, SEQ ID NO: 245, SEQ ID NO: 246, SEQ ID NO: 247, SEQ ID NO: 248, SEQ ID NO: 249, SEQ ID NO: 250, SEQ ID NO: 252, SEQ ID NO: 253, SEQ ID NO: 254, SEQ ID NO: 256, SEQ ID NO: 258, SEQ ID NO: 266, SEQ ID NO: 268, SEQ ID NO: 270, SEQ ID NO: 274, SEQ ID NO: 276, SEQ ID NO: 278, SEQ ID NO: 308, SEQ ID NO: 309, SEQ ID NO: 310, SEQ ID NO: 311, SEQ ID NO: 312, SEQ ID NO: 313, SEQ ID NO: 314, SEQ ID NO: 315, SEQ ID NO: 316, SEQ ID NO: 317, SEQ ID NO: 318, SEQ ID NO: 319, SEQ ID NO: 320, SEQ ID NO: 321, SEQ ID NO: 322, SEQ ID NO: 323, SEQ ID NO: 324, SEQ ID NO: 325, SEQ ID NO: 326, SEQ ID NO: 327, SEQ ID NO: 328, SEQ ID NO: 330, SEQ ID NO: 331, or SEQ ID NO: 332, where the first antigen-binding domain does not comprise (i) a light chain variable domain of SEQ ID NO: 237 and a heavy chain variable domain of SEQ ID NO: 236; (ii) a light chain variable domain of SEQ ID NO: 237 and heavy chain variable domain that is not one of SEQ ID NOs: 239, 241, 243, 245-250, 252-254, 256, 258, 266, 268, 270, 274, 276, 278, 308-328, and 330-332; or (iii) a heavy chain variable domain of SEQ ID NO: 236 and a light chain variable domain that is not one of SEQ ID NOs: 283, 287, 290-293, 301, 302, 304, 306, and 334; (d) a light chain variable domain of SEQ ID NO: 336, SEQ ID NO: 377, SEQ ID NO: 379, SEQ ID NO: 382, SEQ ID NO: 384, SEQ ID NO: 387, SEQ ID NO: 388, SEQ ID NO: 392, SEQ ID NO: 393, SEQ ID NO: 394, SEQ ID NO: 395, SEQ ID NO: 396, SEQ ID NO: 397, or SEQ ID NO: 399, and/or a heavy chain variable domain of SEQ ID NO: 335, SEQ ID NO: 341, SEQ ID NO: 346, SEQ ID NO: 347, SEQ ID NO: 348, SEQ ID NO: 349, SEQ ID NO: 350, SEQ ID NO: 368, SEQ ID NO: 371, SEQ ID NO: 372, SEQ ID NO: 373, SEQ ID NO: 374, or SEQ ID NO: 375, where the first antigen-binding domain does not comprise (i) a light chain variable domain of SEQ ID NO: 336 and a heavy chain variable domain of SEQ ID NO: 335; (ii) a light chain variable domain of SEQ ID NO: 336 and heavy chain variable domain that is not one of SEQ ID NOs: 341, 346-350, 368, and 371-375; or (iii) a heavy chain variable domain of SEQ ID NO: 335 and a light chain variable domain that is not one of SEQ ID NOs: 377, 379, 382, 384, 387, 388, 392-397, and 399; (e) a light chain variable domain of SEQ ID NO: 402, SEQ ID NO: 450, or SEQ ID NO: 451, and/or a heavy chain variable domain of SEQ ID NO: 401, SEQ ID NO: 404, SEQ ID NO: 434, SEQ ID NO: 436, SEQ ID NO: 437, SEQ ID NO: 441, or SEQ ID NO: 442, where the first antigen-binding domain does not comprise (i) a light chain variable domain of SEQ ID NO: 402 and a heavy chain variable domain of SEQ ID NO: 401; (ii) a light chain variable domain of SEQ ID NO: 402 and heavy chain variable domain that is not one of SEQ ID NOs: 404, 434, 436, 437, 441, and 442; or (iii) a heavy chain variable domain of SEQ ID NO: 401 and a light chain variable domain that is not one of SEQ ID NO: 450 or 451; and/or (f) a light chain variable domain of SEQ ID NO: 471, SEQ ID NO: 515, SEQ ID NO: 518, SEQ ID NO: 519, SEQ ID NO: 520, SEQ ID NO: 521, SEQ ID NO: 522, SEQ ID NO: 524, SEQ ID NO: 526, SEQ ID NO: 528, SEQ ID NO: 531, SEQ ID NO: 533, SEQ ID NO: 535, or SEQ ID NO: 536, and/or a heavy chain variable domain of SEQ ID NO: 470, SEQ ID NO: 473, SEQ ID NO: 476, SEQ ID NO: 478, SEQ ID NO: 481, SEQ ID NO: 483, SEQ ID NO: 484, SEQ ID NO: 485, SEQ ID NO: 486, SEQ ID NO: 488, SEQ ID NO: 489, SEQ ID NO: 491, SEQ ID NO: 493, SEQ ID NO: 494, SEQ ID NO: 495, SEQ ID NO: 498, SEQ ID NO: 503, SEQ ID NO: 506, SEQ ID NO: 508, SEQ ID NO: 510, SEQ ID NO: 511, or SEQ ID NO: 512, where the first antigen-binding domain does not comprise (i) a light chain variable domain of SEQ ID NO: 471 and a heavy chain variable domain of SEQ ID NO: 470; (ii) a light chain variable domain of SEQ ID NO: 471 and heavy chain variable domain that is not one of SEQ ID NOs: 473, 476, 478, 481, 483-486, 488, 489, 491, 493-495, 498, 503, 506, 508, and 510-512; or (iii) a heavy chain variable domain of SEQ ID NO: 470 and a light chain variable domain that is not one of SEQ ID NOs: 515, 518-522, 524, 526, 528, 531, 533, 535, and 536; and (g) a light chain variable domain of SEQ ID NO: 538, SEQ ID NO: 581, SEQ ID NO: 587, SEQ ID NO: 591, SEQ ID NO: 599, SEQ ID NO: 600, or SEQ ID NO: 604, and/or a heavy chain variable domain of SEQ ID NO: 537, SEQ ID NO: 539, SEQ ID NO: 542, SEQ ID NO: 544, SEQ ID NO: 545, SEQ ID NO: 552, SEQ ID NO: 553, SEQ ID NO: 556, SEQ ID NO: 557, SEQ ID NO: 558, SEQ ID NO: 564, SEQ ID NO: 566, SEQ ID NO: 567, SEQ ID NO: 572, SEQ ID NO: 573, or SEQ ID NO: 575, where the first antigen-binding domain does not comprise (i) a light chain variable domain of SEQ ID NO: 538 and a heavy chain variable domain of SEQ ID NO: 537; (ii) a light chain variable domain of SEQ ID NO: 538 and heavy chain variable domain that is not one of SEQ ID NOs: 539, 542, 544, 545, 552, 553, 556-558, 564, 566, 567, 572, 573, and 575; or (iii) a heavy chain variable domain of SEQ ID NO: 537 and a light chain variable domain that is not one of SEQ ID NOs: 581, 587, 591, 599, 600, and 604.

[0013] In some embodiments of any of the pharmaceutical compositions described herein, the composition provides for an increase in toxin liberation in the target mammalian cell as compared to a composition including the same amount of a control ABPC and/or an increase in target mammalian cell killing as compared to a composition including the same amount of a control ABPC.

[0014] In some embodiments of any of the pharmaceutical compositions described herein, the composition provides for an increase in endolysosomal delivery in the target mammalian cell as compared to a composition including the same amount of a control ABPC.

[0015] In some embodiments of any of the pharmaceutical compositions described herein, the composition results in a less of a reduction in the level of DLL3 presented on the surface of the target mammalian cell as compared to a composition including the same amount of a control ABPC or does not result in a detectable reduction in the level of DLL3 presented on the surface of the target mammalian cell.

[0016] In some embodiments of any of the pharmaceutical compositions described herein, the target mammalian cell is a cancer cell. In some embodiments of the pharmaceutical compositions described herein, the ABPC is cytotoxic or cytostatic to the target mammalian cell.

[0017] In some embodiments of any of the pharmaceutical compositions described herein, the ABPC is cross-reactive with a non-human primate DLL3 and human DLL3 or cross-reactive with a non-human primate DLL3, a human DLL3, and one or both of rat DLL3 and a mouse DLL3.

[0018] In some embodiments of any of the pharmaceutical compositions described herein, the ABPC includes a single polypeptide. In some embodiments of any of the pharmaceutical compositions described herein, the antigen-binding domain is selected from the group consisting of: a VH domain, a VHH domain, a VNAR domain, and a scFv. In some embodiments of any of the pharmaceutical compositions described herein, the ABPC includes two or more polypeptides. In some embodiments of any of the pharmaceutical compositions described herein, the ABPC is an antibody.

[0019] In some embodiments of any of the pharmaceutical compositions described herein, the half-life of the ABPC in vivo is decreased as compared to the half-life of a control ABPC in vivo.

[0020] In some embodiments of any of the pharmaceutical compositions described herein, the ABPC includes a second antigen-binding domain.

[0021] Also provided herein are an antigen-binding protein constructs (ABPC) including: a first antigen-binding domain that is capable of specifically binding DLL3 or an epitope of DLL3 presented on the surface of a target mammalian cell, where (a) the dissociation rate of the first antigen-binding domain at a pH of about 4.0 to about 6.5 is faster than the dissociation rate at a pH of about 7.0 to about 8.0 or (b) the dissociation constant (KD) of the first antigen-binding domain at a pH of about 4.0 to about 6.5 is greater than the KD at a pH of about 7.0 to about 8.0.

[0022] In some embodiments of any of the ABPCs described herein, the ABPC is degraded in the target mammalian cell following internalization of the ABPC by the target mammalian cell.

[0023] In some embodiments of any of the ABPCs described herein the ABPC includes a conjugated toxin, radioisotope, drug, or small molecule.

[0024] Also provided herein are an antigen-binding protein constructs (ABPC) including a first antigen-binding domain that is capable of specifically binding DLL3 or an epitope of DLL3 presented on the surface of a target mammalian cell and a conjugated toxin, radioisotope, drug, or small molecule, where (a) the dissociation rate of the first antigen-binding domain at a pH of about 4.0 to about 6.5 is faster than the dissociation rate at a pH of about 7.0 to about 8.0; or the dissociation constant (KD) of the first antigen-binding domain at a pH of about 4.0 to about 6.5 is greater than the KD at a pH of about 7.0 to about 8.0 and (b) the composition provides for one or more of an increase in toxin liberation in the target mammalian cell as compared to a composition including the same amount of a control ABPC, an increase in target mammalian cell killing as compared to a composition including the same amount of a control ABPC, and an increase in endolysosomal delivery in the target mammalian cell as compared to a composition including the same amount of a control ABPC.

[0025] In some embodiments of any of the ABPCs described herein the first antigen-binding domain includes one of (a) through (g): (a) a heavy chain variable domain of rovalpituzumab with one or more amino acids substituted with a histidine, where the heavy chain variable domain of rovalpituzumab includes SEQ ID NO: 1; and/or a light chain variable domain of rovalpituzumab with one or more amino acids substituted with a histidine, where the light chain variable domain of rovalpituzumab includes SEQ ID NO: 2; (b) a heavy chain variable domain of SC16.4 with one or more amino acids substituted with a histidine, where the heavy chain variable domain of SC16.4 includes SEQ ID NO: 119; and/or a light chain variable domain of SC16.4 with one or more amino acids substituted with a histidine, where the light chain variable domain of SC16.4 includes SEQ ID NO: 120; (c) a heavy chain variable domain of SC16.13 with one or more amino acids substituted with a histidine, where the heavy chain variable domain of SC16.13 includes SEQ ID NO: 236; and/or a light chain variable domain of SC16.13 with one or more amino acids substituted with a histidine, where the light chain variable domain of SC16.13 includes SEQ ID NO: 237; (d) a heavy chain variable domain of SC16.15 with one or more amino acids substituted with a histidine, where the heavy chain variable domain of SC16.15 includes SEQ ID NO: 335; and/or a light chain variable domain of SC16.15 with one or more amino acids substituted with a histidine, where the light chain variable domain of SC16.15 includes SEQ ID NO: 336; (e) a heavy chain variable domain of SC16.25 with one or more amino acids substituted with a histidine, where the heavy chain variable domain of SC16.25 includes SEQ ID NO: 401; and/or a light chain variable domain of SC16.25 with one or more amino acids substituted with a histidine, where the light chain variable domain of SC16.25 includes SEQ ID NO: 402; (f) a heavy chain variable domain of SC16.34 with one or more amino acids substituted with a histidine, where the heavy chain variable domain of SC16.34 includes SEQ ID NO: 470; and/or a light chain variable domain of SC16.34 with one or more amino acids substituted with a histidine, where the light chain variable domain of SC16.34 includes SEQ ID NO: 471; and (g) a heavy chain variable domain of SC16.67 with one or more amino acids substituted with a histidine, where the heavy chain variable domain of SC16.67 includes SEQ ID NO: 537; and/or a light chain variable domain of SC16.67 with one or more amino acids substituted with a histidine, where the light chain variable domain of SC16.67 includes SEQ ID NO: 538.

[0026] In some embodiments of any of the ABPCs described herein the first DLL3-binding domain includes one of (a) through (g): (a) a heavy chain variable domain including a CDR1, a CDR2, and a CDR3 of SEQ ID NOs: 3-5, respectively, with collectively a total of one or more amino acid positions in SEQ ID NOs: 3-5 substituted with a histidine; and/or a light chain variable domain including a CDR1, a CDR2, and a CDR3 of SEQ ID NOs: 6-8, respectively, with collectively a total of one or more amino acid positions in SEQ ID NOs: 6-8 substituted with a histidine; (b) a heavy chain variable domain including a CDR1, a CDR2, and a CDR3 of SEQ ID NOs: 622-624, respectively, with collectively a total of one or more amino acid positions in SEQ ID NOs: 622-624 substituted with a histidine; and/or a light chain variable domain including a CDR1, a CDR2, and a CDR3 of SEQ ID NOs: 625-627, respectively, with collectively a total of one or more amino acid positions in SEQ ID NOs: 625-627 substituted with a histidine; (c) a heavy chain variable domain including a CDR1, a CDR2, and a CDR3 of SEQ ID NOs: 628-630, respectively, with collectively a total of one or more amino acid positions in SEQ ID NOs: 628-630 substituted with a histidine; and/or a light chain variable domain including a CDR1, a CDR2, and a CDR3 of SEQ ID NOs: 631-633, respectively, with collectively a total of one or more amino acid positions in SEQ ID NOs: 631-633 substituted with a histidine; (d) a heavy chain variable domain including a CDR1, a CDR2, and a CDR3 of SEQ ID NOs: 634-636, respectively, with collectively a total of one or more amino acid positions in SEQ ID NOs: 634-636 substituted with a histidine; and/or a light chain variable domain including a CDR1, a CDR2, and a CDR3 of SEQ ID NOs: 637-639, respectively, with collectively a total of one or more amino acid positions in SEQ ID NOs: 637-639 substituted with a histidine; (e) a heavy chain variable domain including a CDR1, a CDR2, and a CDR3 of SEQ ID NOs: 640-642, respectively, with collectively a total of one or more amino acid positions in SEQ ID NOs: 640-642 substituted with a histidine; and/or a light chain variable domain including a CDR1, a CDR2, and a CDR3 of SEQ ID NOs: 643-645, respectively, with collectively a total of one or more amino acid positions in SEQ ID NOs: 643-645 substituted with a histidine; (f) a heavy chain variable domain including a CDR1, a CDR2, and a CDR3 of SEQ ID NOs: 646-648, respectively, with collectively a total of one or more amino acid positions in SEQ ID NOs: 646-648 substituted with a histidine; and/or a light chain variable domain including a CDR1, a CDR2, and a CDR3 of SEQ ID NOs: 649-651, respectively, with collectively a total of one or more amino acid positions in SEQ ID NOs: 649-651 substituted with a histidine; and (g) a heavy chain variable domain including a CDR1, a CDR2, and a CDR3 of SEQ ID NOs: 652-654, respectively, with collectively a total of one or more amino acid positions in SEQ ID NOs: 652-654 substituted with a histidine; and/or a light chain variable domain including a CDR1, a CDR2, and a CDR3 of SEQ ID NOs: 655-657, respectively, with collectively a total of one or more amino acid positions in SEQ ID NOs: 655-657 substituted with a histidine.

[0027] In some embodiments of any of the ABPCs described herein, the first antigen-binding domain includes one of (a) through (g): (a) a heavy chain variable domain that is at least 90% identical to SEQ ID NO: 1, where the heavy chain variable domain includes a histidine at one or more positions in SEQ ID NO: 1 selected from the group consisting of: 27, 29, 31, 32, 34, 35, 50, 53, 54, 55, 58, 97, 98, 101, 103, 105, and 106; and/or a light chain variable domain that is at least 90% identical to SEQ ID NO: 2, where the light chain variable domain includes a histidine at one or more positions in SEQ ID NO: 2 selected from the group consisting of: 25, 26, 29, 32, 33, 34, 51, 54, 89, 90, 93, 94, 95, and 96; (b) a heavy chain variable domain that is at least 90% identical to SEQ ID NO: 119, where the heavy chain variable domain includes a histidine at one or more positions in SEQ ID NO: 119 selected from the group consisting of: 32, 50, 52, 53, 57, 58, 59, 60, 62, 64, 65, 97, 98, 99, 100, 102, 104, and 105; and/or a light chain variable domain that is at least 90% identical to SEQ ID NO: 120, where the light chain variable domain includes a histidine at one or more positions in SEQ ID NO: 120 selected from the group consisting of: 29, 32, 34, 91, 92, 93, 94 and 96; (c) a heavy chain variable domain that is at least 90% identical to SEQ ID NO: 236, where the heavy chain variable domain includes a histidine at one or more positions in SEQ ID NO: 236 selected from the group consisting of: 27, 29, 31, 33, 34, 35, 36, 37, 54, 55, 56, 58, 60, 98, 100, 102, 106, 108, and 110; and/or a light chain variable domain that is at least 90% identical to SEQ ID NO: 237, where the light chain variable domain includes a histidine at one or more positions in SEQ ID NO: 237 selected from the group consisting of: 25, 29, 32, 33, 49, 50, 90, 91, 93, and 95; (d) a heavy chain variable domain that is at least 90% identical to SEQ ID NO: 335, where the heavy chain variable domain includes a histidine at one or more positions in SEQ ID NO: 335 selected from the group consisting of 27, 32, 33, 34, 50, 98, 101, 102, 103, 104, and 105; and/or a light chain variable domain that is at least 90% identical to SEQ ID NO: 336, where the light chain variable domain includes a histidine at one or more positions in SEQ ID NO: 336 selected from the group consisting of: 27, 29, 32, 34, 52, 53, 89, 90, 91, 92, 93, 94, and 96; (e) a heavy chain variable domain that is at least 90% identical to SEQ ID NO: 401, where the heavy chain variable domain includes a histidine at one or more positions in SEQ ID NO: 401 selected from the group consisting of: 27, 101, 103, 104, 108, and 109; and/or a light chain variable domain that is at least 90% identical to SEQ ID NO: 402, where the light chain variable domain includes a histidine at one or more positions in SEQ ID NO: 402 selected from the group consisting of: 30 and 31; (f) a heavy chain variable domain that is at least 90% identical to SEQ ID NO: 470, where the heavy chain variable domain includes a histidine at one or more positions in SEQ ID NO: 470 selected from the group consisting of 24, 27, 29, 32, 34, 35, 50, 51, 53, 54, 56, 58, 59, 60, 63, 98, 101, 103, 105, 106, and 107; and/or a light chain variable domain that is at least 90% identical to SEQ ID NO: 471, where the light chain variable domain includes a histidine at one or more positions in SEQ ID NO: 471 selected from the group consisting of: 29, 32, 33, 34, 50, 51, 53, 55, 89, 92, 94, 96 and 97; and (g) a heavy chain variable domain that is at least 90% identical to SEQ ID NO: 537, where the heavy chain variable domain includes a histidine at one or more positions in SEQ ID NO: 537 selected from the group consisting of 26, 29, 31, 32, 53, 54, 57, 58, 59, 65, 67, 68, 103, 104, and 106; and/or a light chain variable domain that is at least 90% identical to SEQ ID NO: 538, where the light chain variable domain includes a histidine at one or more positions in SEQ ID NO: 538 selected from the group consisting of: 28, 34, 53, 93, 94, and 98.

[0028] In some embodiments of any of the ABPCs described herein, the first antigen-binding domain includes one of (a) through (g): (a) a light chain variable domain of SEQ ID NO: 2, SEQ ID NO: 55, SEQ ID NO: 56, SEQ ID NO: 59, SEQ ID NO: 62, SEQ ID NO: 63, SEQ ID NO: 64, SEQ ID NO: 65, SEQ ID NO: 66, SEQ ID NO: 69, SEQ ID NO: 72, SEQ ID NO: 73, SEQ ID NO: 76, SEQ ID NO: 77, SEQ ID NO: 78, SEQ ID NO: 79, SEQ ID NO: 99, SEQ ID NO: 100, SEQ ID NO: 101, SEQ ID NO: 102, SEQ ID NO: 103, SEQ ID NO: 104, SEQ ID NO: 105, SEQ ID NO: 106, SEQ ID NO: 107, SEQ ID NO: 108, SEQ ID NO: 109, SEQ ID NO: 110, SEQ ID NO: 111, SEQ ID NO: 112, SEQ ID NO: 113, SEQ ID NO: 114, SEQ ID NO: 115, SEQ ID NO: 116, SEQ ID NO: 117, or SEQ ID NO: 118, and/or a heavy chain variable domain of SEQ ID NO: 1, SEQ ID NO: 17, SEQ ID NO: 19, SEQ ID NO: 21, SEQ ID NO: 22, SEQ ID NO: 24, SEQ ID NO: 25, SEQ ID NO: 26, SEQ ID NO: 29, SEQ ID NO: 30, SEQ ID NO: 31, SEQ ID NO: 34, SEQ ID NO: 43, SEQ ID NO: 44, SEQ ID NO: 47, SEQ ID NO: 49, SEQ ID NO: 51, SEQ ID NO: 52, SEQ ID NO: 81, SEQ ID NO: 82, SEQ ID NO: 83, SEQ ID NO: 84, SEQ ID NO: 85, SEQ ID NO: 86, SEQ ID NO: 87, SEQ ID NO: 88, SEQ ID NO: 89, SEQ ID NO: 90, SEQ ID NO: 91, SEQ ID NO: 92, SEQ ID NO: 93, SEQ ID NO: 94, SEQ ID NO: 95, SEQ ID NO: 96, SEQ ID NO: 97, or SEQ ID NO: 98, where the first antigen-binding domain does not comprise (i) a light chain variable domain of SEQ ID NO: 2 and a heavy chain variable domain of SEQ ID NO: 1; (ii) a light chain variable domain of SEQ ID NO: 2 and heavy chain variable domain that is not one of SEQ ID NOs: 17, 19, 21, 22, 24-26, 29-31, 34, 43, 44, 47, 49, 51, 52, and 81-98; or (iii) a heavy chain variable domain of SEQ ID NO: 1 and a light chain variable domain that is not one of SEQ ID NOs: 55, 56, 59, 62-66, 69, 72, 73, 76-79, and 99-118; (b) a light chain variable domain of SEQ ID NO: 120, SEQ ID NO: 163, SEQ ID NO: 166, SEQ ID NO: 168, SEQ ID NO: 178, SEQ ID NO: 179, SEQ ID NO: 180, SEQ ID NO: 181, SEQ ID NO: 183, SEQ ID NO: 226, SEQ ID NO: 227, SEQ ID NO: 228, SEQ ID NO: 229, SEQ ID NO: 230, SEQ ID NO: 231, SEQ ID NO: 232, SEQ ID NO: 233, SEQ ID NO: 234, or SEQ ID NO: 235, and/or a heavy chain variable domain of SEQ ID NO: 119, SEQ ID NO: 127, SEQ ID NO: 130, SEQ ID NO: 131, SEQ ID NO: 133, SEQ ID NO: 134, SEQ ID NO: 138, SEQ ID NO: 139, SEQ ID NO: 140, SEQ ID NO: 141, SEQ ID NO: 143, SEQ ID NO: 145, SEQ ID NO: 146, SEQ ID NO: 148, SEQ ID NO: 149, SEQ ID NO: 150, SEQ ID NO: 151, SEQ ID NO: 153, SEQ ID NO: 155, SEQ ID NO: 156; SEQ ID NO: 185, SEQ ID NO: 186, SEQ ID NO: 187, SEQ ID NO: 188, SEQ ID NO: 189, SEQ ID NO: 190, SEQ ID NO: 191, SEQ ID NO: 192, SEQ ID NO: 193, SEQ ID NO: 194, SEQ ID NO: 195, SEQ ID NO: 196, SEQ ID NO: 197, SEQ ID NO: 198, SEQ ID NO: 199, SEQ ID NO: 200, SEQ ID NO: 201, SEQ ID NO: 202, SEQ ID NO: 203, SEQ ID NO: 204, SEQ ID NO: 205, SEQ ID NO: 206, SEQ ID NO: 207, SEQ ID NO: 208, SEQ ID NO: 209, SEQ ID NO: 210, SEQ ID NO: 211, SEQ ID NO: 212, SEQ ID NO: 213, SEQ ID NO: 214, SEQ ID NO: 216, SEQ ID NO: 217, SEQ ID NO: 218, SEQ ID NO: 220, SEQ ID NO: 221, or SEQ ID NO: 223, where the first antigen-binding domain does not comprise (i) a light chain variable domain of SEQ ID NO: 120 and a heavy chain variable domain of SEQ ID NO: 119; (ii) a light chain variable domain of SEQ ID NO: 120 and heavy chain variable domain that is not one of SEQ ID NOs: 127, 130, 131, 133, 134, 138-141, 143, 145, 146, 148-151, 153, 155, 156, 185-214, 216-218, 220, 221, and 223; or (iii) a heavy chain variable domain of SEQ ID NO: 119 and a light chain variable domain that is not one of SEQ ID NOs: 163, 166, 168, 178-181, 183, and 226-235; (c) a light chain variable domain of SEQ ID NO: 237, SEQ ID NO: 283, SEQ ID NO: 287, SEQ ID NO: 290, SEQ ID NO: 291, SEQ ID NO: 292, SEQ ID NO: 293, SEQ ID NO: 301, SEQ ID NO: 302, SEQ ID NO: 304, SEQ ID NO: 306, or SEQ ID NO: 334; and/or a heavy chain variable domain of SEQ ID NO: 236, SEQ ID NO: 239, SEQ ID NO: 241, SEQ ID NO: 243, SEQ ID NO: 245, SEQ ID NO: 246, SEQ ID NO: 247, SEQ ID NO: 248, SEQ ID NO: 249, SEQ ID NO: 250, SEQ ID NO: 252, SEQ ID NO: 253, SEQ ID NO: 254, SEQ ID NO: 256, SEQ ID NO: 258, SEQ ID NO: 266, SEQ ID NO: 268, SEQ ID NO: 270, SEQ ID NO: 274, SEQ ID NO: 276, SEQ ID NO: 278, SEQ ID NO: 308, SEQ ID NO: 309, SEQ ID NO: 310, SEQ ID NO: 311, SEQ ID NO: 312, SEQ ID NO: 313, SEQ ID NO: 314, SEQ ID NO: 315, SEQ ID NO: 316, SEQ ID NO: 317, SEQ ID NO: 318, SEQ ID NO: 319, SEQ ID NO: 320, SEQ ID NO: 321, SEQ ID NO: 322, SEQ ID NO: 323, SEQ ID NO: 324, SEQ ID NO: 325, SEQ ID NO: 326, SEQ ID NO: 327, SEQ ID NO: 328, SEQ ID NO: 330, SEQ ID NO: 331, or SEQ ID NO: 332, where the first antigen-binding domain does not comprise (i) a light chain variable domain of SEQ ID NO: 237 and a heavy chain variable domain of SEQ ID NO: 236; (ii) a light chain variable domain of SEQ ID NO: 237 and heavy chain variable domain that is not one of SEQ ID NOs: 239, 241, 243, 245-250, 252-254, 256, 258, 266, 268, 270, 274, 276, 278, 308-328, and 330-332; or (iii) a heavy chain variable domain of SEQ ID NO: 236 and a light chain variable domain that is not one of SEQ ID NOs: 283, 287, 290-293, 301, 302, 304, 306, and 334;

(d) a light chain variable domain of SEQ ID NO: 336, SEQ ID NO: 377, SEQ ID NO: 379, SEQ ID NO: 382, SEQ ID NO: 384, SEQ ID NO: 387, SEQ ID NO: 388, SEQ ID NO: 392, SEQ ID NO: 393, SEQ ID NO: 394, SEQ ID NO: 395, SEQ ID NO: 396, SEQ ID NO: 397, or SEQ ID NO: 399, and/or a heavy chain variable domain of SEQ ID NO: 335, SEQ ID NO: 341, SEQ ID NO: 346, SEQ ID NO: 347, SEQ ID NO: 348, SEQ ID NO: 349, SEQ ID NO: 350, SEQ ID NO: 368, SEQ ID NO: 371, SEQ ID NO: 372, SEQ ID NO: 373, SEQ ID NO: 374, or SEQ ID NO: 375, where the first antigen-binding domain does not comprise (i) a light chain variable domain of SEQ ID NO: 336 and a heavy chain variable domain of SEQ ID NO: 335; (ii) a light chain variable domain of SEQ ID NO: 336 and heavy chain variable domain that is not one of SEQ ID NOs: 341, 346-350, 368, and 371-375; or (iii) a heavy chain variable domain of SEQ ID NO: 335 and a light chain variable domain that is not one of SEQ ID NOs: 377, 379, 382, 384, 387, 388, 392-397, and 399; (e) a light chain variable domain of SEQ ID NO: 402, SEQ ID NO: 450, or SEQ ID NO: 451; and/or a heavy chain variable domain of SEQ ID NO: 401, SEQ ID NO: 404, SEQ ID NO: 434, SEQ ID NO: 436, SEQ ID NO: 437, SEQ ID NO: 441, or SEQ ID NO: 442, where the first antigen-binding domain does not comprise (i) a light chain variable domain of SEQ ID NO: 402 and a heavy chain variable domain of SEQ ID NO: 401; (ii) a light chain variable domain of SEQ ID NO: 402 and heavy chain variable domain that is not one of SEQ ID NOs: 404, 434, 436, 437, 441, and 442; or (iii) a heavy chain variable domain of SEQ ID NO: 401 and a light chain variable domain that is not one of SEQ ID NO: 450 or 451;
(f) a light chain variable domain of SEQ ID NO: 471, SEQ ID NO: 515, SEQ ID NO: 518, SEQ ID NO: 519, SEQ ID NO: 520, SEQ ID NO: 521, SEQ ID NO: 522, SEQ ID NO: 524, SEQ ID NO: 526, SEQ ID NO: 528, SEQ ID NO: 531, SEQ ID NO: 533, SEQ ID NO: 535, or SEQ ID NO: 536, and/or a heavy chain variable domain of SEQ ID NO: 470, SEQ ID NO: 473, SEQ ID NO: 476, SEQ ID NO: 478, SEQ ID NO: 481, SEQ ID NO: 483, SEQ ID NO: 484, SEQ ID NO: 485, SEQ ID NO: 486, SEQ ID NO: 488, SEQ ID NO: 489, SEQ ID NO: 491, SEQ ID NO: 493, SEQ ID NO: 494, SEQ ID NO: 495, SEQ ID NO: 498, SEQ ID NO: 503, SEQ ID NO: 506, SEQ ID NO: 508, SEQ ID NO: 510, SEQ ID NO: 511, or SEQ ID NO: 512, where the first antigen-binding domain does not comprise (i) a light chain variable domain of SEQ ID NO: 471 and a heavy chain variable domain of SEQ ID NO: 470; (ii) a light chain variable domain of SEQ ID NO: 471 and heavy chain variable domain that is not one of SEQ ID NOs: 473, 476, 478, 481, 483-486, 488, 489, 491, 493-495, 498, 503, 506, 508, and 510-512; or (iii) a heavy chain variable domain of SEQ ID NO: 470 and a light chain variable domain that is not one of SEQ ID NOs: 515, 518-522, 524, 526, 528, 531, 533, 535, and 536; and (g) a light chain variable domain of SEQ ID NO: 538, SEQ ID NO: 581, SEQ ID NO: 587, SEQ ID NO: 591, SEQ ID NO: 599, SEQ ID NO: 600, or SEQ ID NO: 604, and/or a heavy chain variable domain of SEQ ID NO: 537, SEQ ID NO: 539, SEQ ID NO: 542, SEQ ID NO: 544, SEQ ID NO: 545, SEQ ID NO: 552, SEQ ID NO: 553, SEQ ID NO: 556, SEQ ID NO: 557, SEQ ID NO: 558, SEQ ID NO: 564, SEQ ID NO: 566, SEQ ID NO: 567, SEQ ID NO: 572, SEQ ID NO: 573, or SEQ ID NO: 575, where the first antigen-binding domain does not comprise (i) a light chain variable domain of SEQ ID NO: 538 and a heavy chain variable domain of SEQ ID NO: 537; (ii) a light chain variable domain of SEQ ID NO: 538 and heavy chain variable domain that is not one of SEQ ID NOs: 539, 542, 544, 545, 552, 553, 556-558, 564, 566, 567, 572, 573, and 575; or (iii) a heavy chain variable domain of SEQ ID NO: 537 and a light chain variable domain that is not one of SEQ ID NOs: 581, 587, 591, 599, 600, and 604.

[0029] In some embodiments of any of the ABPCs described herein, a composition including the ABPC provides for an increase in toxin liberation in the target mammalian cell as compared to a composition including the same amount of a control ABPC and/or an increase in target mammalian cell killing as compared to a composition including the same amount of a control ABPC.

[0030] In some embodiments of any of the ABPCs described herein, a composition including the ABPC provides for an increase in endolysosomal delivery in the target mammalian cell as compared to a composition including the same amount of a control ABPC.

[0031] In some embodiments of any of the ABPCs described herein, a composition including the ABPC results in a less of a reduction in the level of DLL3 presented on the surface of the target mammalian cell as compared to a composition including the same amount of a control ABPC; or does not result in a detectable reduction in the level of DLL3 presented on the surface of the target mammalian cell.

[0032] In some embodiments of any of the ABPCs described herein, the target mammalian cell is a cancer cell. In some embodiments of any of the ABPCs described herein, the ABPC is cytotoxic or cytostatic to the target mammalian cell.

[0033] In some embodiments of any of the ABPCs described herein, ABPC is cross-reactive with a non-human primate DLL3 and human DLL3 or cross-reactive with a non-human primate DLL3, a human DLL3, and one or both of rat DLL3 and a mouse DLL3.

[0034] In some embodiments of any of the ABPCs described herein, the ABPC includes a single polypeptide. In some embodiments of any of the ABPCs described herein, the antigen-binding domain is selected from the group consisting of: a VH domain, a VHH domain, a VNAR domain, and a scFv. In some embodiments of any of the ABPCs described herein, the ABPC includes two or more polypeptides. In some embodiments of any of the ABPCs described herein, the ABPC is an antibody.

[0035] In some embodiments of any of the ABPCs described herein, the half-life of the ABPC in vivo is decreased as compared to the half-life of a control ABPC in vivo.

[0036] In some embodiments of any of the ABPCs described herein, the ABPC includes a second antigen-binding domain.

[0037] Also provided herein are kits including at least one dose of the pharmaceutical composition of any of the pharmaceutical compositions described herein or any of the ABPCs described herein.

[0038] Also provided here are methods of treating a cancer characterized by having a population of cancer cells that have DLL3 or an epitope of DLL3 presented on their surface, the method including, administering a therapeutically effective amount of any one of the pharmaceutical compositions described herein or any one of the ABPCs described herein to a subject identified as having a cancer characterized by having the population of cancer cells.

[0039] Also provided herein, are methods of reducing the volume of a tumor in a subject, where the tumor is characterized by having a population of cancer cells that have DLL3 or an epitope of DLL3 presented on their surface, the method including, administering a therapeutically effective amount of any of the pharmaceutical compositions described herein or any one of the ABPCs described herein to a subject identified as having a cancer characterized by having the population of cancer cells.

[0040] Also provided herein are methods of inducing cell death in a cancer cell in a subject, where the cancer cell has DLL3 or an epitope of DLL3 presented on its surface, where the method includes administering a therapeutically effective amount of any of the pharmaceutical compositions described herein or any one of the ABPCs described herein to a subject identified as having a cancer characterized by having a population of the cancer cells.

[0041] Also provided herein are methods of decreasing the risk of developing a metastasis or decreasing the risk of developing an additional metastasis in a subject having a cancer, wherein the cancer is characterized by having a population of cancer cells that have DLL3 or an epitope of DLL3 presented on their surface the method including, administering a therapeutically effective amount of any one of the pharmaceutical compositions described herein or any one of the ABPCs described herein to a subject identified as having a cancer characterized by having the population of cancer cells.

[0042] As used herein, the term “antigen-binding protein construct” is (i) a single polypeptide that includes at least one antigen-binding domain or (ii) a complex of two or more polypeptides (e.g., the same or different polypeptides) that together form at least one antigen-binding domain. Non-limiting examples and aspects of antigen-binding protein constructs are described herein. Additional examples and aspects of antigen-binding protein constructs are known in the art.

[0043] A “multi-specific antigen-binding protein construct” is an antigen-binding protein construct that includes two or more different antigen-binding domains that collectively specifically bind two or more different epitopes. The two or more different epitopes may be epitopes on the same antigen (e.g., a single polypeptide present on the surface of a cell) or on different antigens (e.g., different proteins present on the surface of the same cell or present on the surface of different cells). In some aspects, the antigen is present on the surface of the cell. In some aspects, a multi-specific antigen-binding protein construct binds two different epitopes (i.e., a “bispecific antigen-binding protein construct”). In some aspects, a multi-specific antigen-binding protein construct binds three different epitopes (i.e., a “trispecific antigen-binding protein construct”). In some aspects, a multi-specific antigen-binding protein construct binds four different epitopes (i.e., a “quadspecific antigen-binding protein construct”). In some aspects, a multi-specific antigen-binding protein construct binds five different epitopes (i.e., a “quintspecific antigen-binding protein construct”). Each binding specificity may be present in any suitable valency. Non-limiting examples of multi-specific antigen-binding protein constructs are described herein.

[0044] An “antigen-binding domain” is one or more protein domain(s) (e.g., formed from amino acids from a single polypeptide or formed from amino acids from two or more polypeptides (e.g., the same or different polypeptides) that is capable of specifically binding to one or more different antigen(s). In some examples, an antigen-binding domain can bind to an antigen or epitope with specificity and affinity similar to that of naturally-occurring antibodies. In some embodiments, the antigen-binding domain can be an antibody or a fragment thereof. In some embodiments, an antigen-binding domain can include an alternative scaffold. Non-limiting examples of antigen-binding domains are described herein. Additional examples of antigen-binding domains are known in the art. In some examples, an antigen-binding domain can bind to a single antigen.

[0045] The term “antibody” is used herein in its broadest sense and includes certain types of immunoglobulin molecules that include one or more antigen-binding domains that specifically bind to an antigen or epitope. An antibody specifically includes, e.g., intact antibodies (e.g., intact immunoglobulins, e.g., human IgG (e.g., human IgG1, human IgG2, human IgG3, human IgG4)), antibody fragments, and multi-specific antibodies. One example of an antigen-binding domain is an antigen-binding domain formed by a VH-VL dimer. Additional examples of an antibody are described herein. Additional examples of an antibody are known in the art.

[0046] The phrase “endosomal/lysosomal pathway” refers to a network of endosomes (early endosomes, multi-vesicular bodies, late endosomes, and lysosomes) in the cytoplasm of a mammalian cell, wherein molecules internalized through cell-mediated internalization processes, e.g., pinocytosis, micropinocytosis, receptor-mediated endocytosis, and/or phagocytosis, are sorted.

[0047] Once the endosomes in the endosomal/lysosomal pathway are purified or isolated, assays for a target protein (e.g., an antigen-binding protein construct described herein) can be performed using methods known in the art (ELISA, Western blot, immunofluorescence, and immunoprecipitation followed by an assay for protein concentration), and can be used to determine the concentration or relative level of the target protein in the endosomes. Alternatively, endosomes in the endosomal/lysosomal pathway can be imaged using immunofluorescence microscopy using an detectably-labelled antibody (e.g., a fluorophore-labelled, a dye-labelled, or a GFP-labelled antibody, e.g., CellLight™ Early Endosome-GFP) that specifically binds to a characteristic protein present in the endosomes (e.g., EEA1 for early endosomes) and a fluorophore-labelled antibody that specifically binds to the protein of interest (e.g., an antigen-binding protein construct), and the level of the target protein in the endosomes can be determined by quantitation of the overlap in the fluorescence emissions of the two different antibodies.

[0048] The phrase “endolysosomal delivery” refers to rate of accumulation over time or the total accumulation at a specific timepoint of an antigen-binding protein construct (e.g., any of the antigen-binding protein constructs described herein) in the endosomal/lysosomal pathway in a mammalian cell (e.g., any of the exemplary target mammalian cells described herein).

[0049] An exemplary method to calculate the increase in endolysosomal delivery of a pH engineered ABPC variant as compared to its corresponding starting ABPC from cellular fluorescence data is to measure the ratio of the variant's mean fluorescence intensity minus the mean fluorescence intensity of a non-binding IgG control, then all divided by the variant's corresponding starting ABPC's mean fluorescence intensity minus the mean fluorescence intensity of the IgG control.

[0050] An exemplary assay for measuring endolysosomal delivery of any of the ABPCs described herein include those which involve labeling of an ABPC with a fluorescent dye, followed by incubation of the labeled ABPC with cells and measurement of cellular fluorescence as an indicator of endolysosomal delivery of the ABPC (e.g., as described generally in Wustner, Traffic 7(6):699-715, 2006). Alternatively, pH-sensitive dyes which preferentially fluoresce at acidic pH but not neutral pH can be used to label any of the ABPCs described herein, which can then be incubated with cells and the cellular fluorescence measured as an indicator of delivery of the ABPC into acidic endolysosomal compartments.

[0051] The term “population” when used before a noun means two or more of the specific noun. For example, the phrase “a population of cancer cells” means “two or more cancer cells.” Non-limiting examples of cancer cells are described herein.

[0052] The phrase “cytostatic to a cell” refers to a direct or indirect decrease in the proliferation (cell division) of the cell (e.g., a cancer cell) in vivo or in vitro. When an agent is cytostatic to a cell, the agent can, e.g., directly or indirectly result in cell cycle arrest of the cell (e.g., a cancer cell). In some examples, an agent that is cytostatic to a cell can reduce the number of cells in a population of the cells that are in S phase (as compared to the number of cells in a population of the cells that are in S phase prior to contact with the agent). In some examples, an agent that is cytostatic to a cell can reduce the percentage of the cells in S phase by at least 20%, at least 40%, at least 60%, or at least 80% (e.g., as compared to the percentage of cells in a population of the cells that are in S phase prior to contact with the agent).

[0053] The phrase “cytotoxic to a cell” refers to the inducement, directly or indirectly, in the death (e.g., necrosis or apoptosis) of the cell (e.g., a mammalian cell, e.g., a cancer cell).

[0054] “Affinity” refers to the strength of the sum total of non-covalent interactions between an antigen-binding site and its binding partner (e.g., an antigen or epitope). Unless indicated otherwise, as used herein, “affinity” refers to intrinsic binding affinity, which reflects a 1:1 interaction between members of an antigen-binding domain and an antigen or epitope. The affinity of a molecule X for its partner Y can be represented by the dissociation equilibrium constant (K_{D}). Affinity can be measured by common methods known in the art, including those described herein. Affinity can be determined, for example, using surface plasmon resonance (SPR) technology (e.g., BIACORE®) or biolayer interferometry (e.g., FORTEBIO®). Additional methods for determining the affinity for an antigen-binding domain and its corresponding antigen or epitope are known in the art.

[0055] The term “epitope” means a portion of an antigen that is specifically bound by an antigen-binding domain through a set of physical interactions between: (i) all monomers (e.g. individual amino acid residues, sugar side chains, and post-translationally modified amino acid residues) on the portion of the antigen-binding domain that specifically binds the antigen and (ii) all monomers (e.g. individual amino acid residues, sugar side chains, post-translationally modified amino acid residues) on the portion of the antigen that is specifically bound by the antigen-binding domain. Epitopes can, e.g., consist of surface-accessible amino acid residues, sugar side chains, phosphorylated amino acid residues, methylated amino acid residues, and/or acetylated amino acid residues and may have specific three-dimensional structural characteristics, as well as specific charge characteristics. Conformational and non-conformational epitopes are distinguished in that binding to the former, but not the latter, may be lost in the presence of denaturing solvents. In some embodiments, an epitope is defined by a linear amino acid sequence of at least about 3 to 6 amino acids, or about 10 to 15 amino acids. In some embodiments, an epitope refers to a portion of a full-length protein or a portion thereof that is defined by a three-dimensional structure (e.g., protein folding). In some embodiments, an epitope is defined by a discontinuous amino acid sequence that is brought together via protein folding. In some embodiments, an epitope is defined by a discontinuous amino acid sequence that is brought together by quaternary structure (e.g., a cleft formed by the interaction of two different polypeptide chains). The amino acid sequences between the residues that define the epitope may not be critical to three-dimensional structure of the epitope. A conformational epitope may be determined and screened using assays that compare binding of antigen-binding protein construct to a denatured version of the antigen, such that a linear epitope is generated. An epitope may include amino acid residues that are directly involved in the binding, and other amino acid residues, which are not directly involved in the binding.

[0056] Methods for identifying an epitope to which an antigen-binding domain specifically binds are known in the art, e.g., structure-based analysis (e.g. X-ray crystallography, NMR, and/or electron microscopy) (e.g. on the antigen and/or the antigen-antigen binding domain complex) and/or mutagenesis-based analysis (e.g. alanine scanning mutagenesis, glycine scanning mutagenesis, and homology scanning mutagenesis) wherein mutants are measured in a binding assay with a binding partner, many of which are known in the art.

[0057] The term “paratope” means a portion of an antigen-binding domain that specifically binds to an antigen through a set of physical interactions between: (i) all monomers (e.g. individual amino acid residues, sugar side chains, posttranslationally modified amino acid residues) on the portion of the antigen-binding domain that specifically binds the antigen and (ii) all monomers (e.g. individual amino acid residues, sugar side chains, posttranslationally modified amino acid residues) on the portion of the antigen that is specifically bound by the antigen-binding domain. Paratopes can, e.g. consist of surface-accessible amino acid residues and may have specific three-dimensional structural characteristics, as well as specific charge characteristics. In some embodiments, a paratope refers to a portion of a full-length antigen-binding domain or a portion thereof that is defined by a three-dimensional structure (e.g., protein folding). In some embodiments, a paratope is defined by a discontinuous amino acid sequence that is brought together via protein folding. In some embodiments, an epitope is defined by a discontinuous amino acid sequence that is brought together by quaternary structure (e.g., a cleft formed by the interaction of two different polypeptide chains). The amino acid sequences between the residues that define the paratope may not be critical to three-dimensional structure of the paratope. A paratope may comprise amino acid residues that are directly involved in the binding, and other amino acid residues, which are not directly involved in the binding.

[0058] Methods for identifying a paratope to which an antigen-binding domain specifically binds are known in the art, e.g., structure-based analysis (e.g., X-ray crystallography, NMR, and/or electron microscopy) (e.g. on the antigen-binding domain, and/or the antigen binding domain-antigen complex), and/or mutagenesis-based analysis (e.g., alanine scanning mutagenesis, glycine scanning mutagenesis, and homology scanning mutagenesis) wherein mutants are measured in a binding assay with a binding partner, many of which are known in the art.

[0059] The phrase “present on the surface of a mammalian cell” means (1) an antigen that physically attached to or at least partially embedded in the plasma membrane of a mammalian cell (e.g., a transmembrane protein, a peripheral membrane protein, a lipid-anchored protein (e.g., a GPI-anchor), an N-myristolyated protein, or a S-palmitoylated protein) or (2) an antigen that is stably bound to its cognate receptor, where the cognate receptor is physically attached to the plasma membrane of a mammalian cell (e.g., a ligand bound to its cognate receptor, where the cognate receptor is physically attached to the plasma membrane). Non-limiting methods for determining the presence of antigen on the surface of a mammalian cell include fluorescence-activated cell sorting (FACS), immunohistochemistry, cell-fractionation assays and Western blotting.

[0060] The phrase “control ABPC” or “control antigen-binding protein construct” means (i) an ABPC that is capable of specifically binding to DLL3 or an epitope of DLL3 presented on the surface of a mammalian cell (e.g., a target mammalian cell), where one or both of the following is true: (a) the dissociation rate of the first antigen-binding domain at a pH of about 4.0 to about 6.5 (e.g., any of the subranges of this range described herein) is no more than 3-fold (e.g., no more than 2.8-fold, no more than 2.6-fold, no more than 2.5-fold, no more than 2.4-fold, no more than 2.2-fold, no more than 2.0-fold, no more than 1.8-fold, no more than 1.6-fold, no more than 1.5-fold, no more than 1.4-fold, no more than 1.2-fold, no more than 1.0-fold, no more than 0.8-fold, no more than 0.6-fold, no more than 0.5-fold, no more than 0.4-fold, no more than 0.3-fold no more than 0.2-fold, or no more than 0.1-fold) faster than the dissociation rate at a pH of about 7.0 to about 8.0 (e.g., any of the subranges of this range described herein); or (b) the dissociation constant (K_{D}) of the first antigen-binding domain at a pH of about 4.0 to about 6.5 (e.g., any of the subranges of this range described herein) is no more than 3-fold (e.g., no more than 2.8-fold, no more than 2.6-fold, no more than 2.5-fold, no more than 2.4-fold, no more than 2.2-fold, no more than 2.0-fold, no more than 1.8-fold, no more than 1.6-fold, no more than 1.5-fold, no more than 1.4-fold, no more than 1.2-fold, no more than 1.0-fold, no more than 0.8-fold, no more than 0.6-fold, no more than 0.5-fold, no more than 0.4-fold, no more than 0.3-fold no more than 0.2-fold, or no more than 0.1-fold) greater than the K_{D} at a pH of about 7.0 to about 8.0 (e.g., any of the subranges of this range described herein); and/or (ii) rovalpituzumab, SC16.4, SC16.13, SC16.15, SC16.25, SC16.34, or SC16.67.

[0061] The term “extracellular space” means the liquid exterior to the plasma membrane of a mammalian cell. When a mammalian cell is in vitro, the extracellular space can be a liquid culture medium. When a mammalian cell is in vivo, the extracellular space can be, e.g., plasma, serum, blood, interstitial fluid, or lymph.

[0062] The term “endolysosomal space” means the fluid encapsulated by the vesicles and organelles that make-up the endosomal/lysosomal pathway in a mammalian cell.

[0063] The phrase “a reduced level” or “a decreased level” can be a reduction or decrease of at least a 1% (e.g., at least 2%, at least 4%, at least 6%, at least 8%, at least 10%, at least 12%, at least 14%, at least 16%, at least 18%, at least 20%, at least 22%, at least 24%, at least 26%, at least 30%, at least 35%, at least 40%, at least 45%, at least 50%, at least 55%, at least 60%, at least 65%, at least 70%, at least 75%, at least 80%, at least 85%, at least 90%, at least 95%, or at least 99%) reduction as compared to a reference level or value.

[0064] The term “cell killing potency” refers to the ability of an agent (e.g., any of the ABPCs described herein) to induce, directly or indirectly, the apoptosis and/or necrosis of a mammalian cell (e.g., a cancer cell), measured as a rate over time or at a relevant timepoint. Methods for determining the cell killing potency of a cell are known in the art (e.g., trypan blue staining, microscopy, fluorescence-assisted cell sorting, and assays to detect markers of apoptosis (e.g., Annexin V)). In non-limiting examples, cell killing potency can be measured, e.g., by cell killing at a single concentration of an agent, by the IC50 of the agent (i.e. the concentration of the agent whereby half the maximal cell killing potency is achieved), or by the ratio of an agent's dissociation constant KD on mammalian cells divided by its IC50. In some non-limiting examples, the IC50s and/or the KD ratios described herein are compared to those of a control ABPC (as defined herein), and, optionally, demonstrate that the ABPCs described herein have a higher cell killing potency as compared to the control ABPC.

[0065] The term “toxin liberation” refers to the ability of a mammalian cell (e.g., a non-cancerous mammalian cell or a cancer cell) to internalize (e.g., via pinocytosis and/or receptor-mediated endocytosis) any of the ABPCs described herein (e.g., any of ABPCs or control ABPCs described herein) that are conjugated to a toxin, and subsequently release the toxin conjugated to the ABPC, measured as a rate over time or at a specific timepoint. Toxin liberation can be assessed using a variety of different exemplary assays, e.g., ELISA, immunofluorescence, cell killing assays, cell cycle arrest assays, DNA damage assays, mass spectrometry, HPLC, and/or an isotope-labeled toxin.

[0066] The phrase “target cell” or “target mammalian cell” or “mammalian target cell” means a mammalian cell that has at least one DLL3 present on its surface. In some examples, a mammalian target cell can be a cancer cell. In some embodiments of a target mammalian cell can have a total of about 1 to about 10,000,000, about 1 to about 9,000,000, about 1 to about 8,000,000, about 1 to about 7,000,000, about 1 to about 6,000,000, about 1 to about 5,000,000, about 1 to about 4,000,000, about 1 to about 3,000,000, about 1 to about 2,000,000, about 1 to about 1,000,000, about 1 to about 800,000, about 1 to about 600,000, about 1 to about 400,000, about 1 to about 200,000, about 1 to about 100,000, about 1 to about 80,000, about 1 to about 80,000, about 1 to about 75,000, about 1 to about 70,000, about 1 to about 65,000, about 1 to about 60,000, about 1 to about 55,000, about 1 to about 50,000, about 1 to about 45,000, about 1 to about 40,000, about 1 to about 35,000, about 1 to about 30,000, about 1 to about 25,000, about 1 to about 20,000, about 1 to about 15,000, about 1 to about 10,000, about 1 to about 7,500, about 1 to about 5,000, about 1 to about 4,000, about 1 to about 3,000, about 1 to about 2,000, about 1 to about 1,000, about 1 to about 500, about 1 to about 100, about 1 to about 50, about 1 to about 10, about 10 to about 10,000,000, about 10 to about 9,000,000, about 10 to about 8,000,000, about 10 to about 7,000,000, about 10 to about 6,000,000, about 10 to about 5,000,000, about 10 to about 4,000,000, about 10 to about 3,000,000, about 10 to about 2,000,000, about 10 to about 1,000,000, about 10 to about 800,000, about 10 to about 600,000, about 10 to about 400,000, about 10 to about 200,000, about 10 to about 100,000, about 10 to about 80,000, about 10 to about 80,000, about 10 to about 75,000, about 10 to about 70,000, about 10 to about 65,000, about 10 to about 60,000, about 10 to about 55,000, about 10 to about 50,000, about 10 to about 45,000, about 10 to about 40,000, about 10 to about 35,000, about 10 to about 30,000, about 10 to about 25,000, about 10 to about 20,000, about 10 to about 15,000, about 10 to about 10,000, about 10 to about 7,500, about 10 to about 5,000, about 10 to about 4,000, about 10 to about 3,000, about 10 to about 2,000, about 10 to about 1,000, about 10 to about 500, about 10 to about 100, about 10 to about 50, about 50 to about 10,000,000, about 50 to about 9,000,000, about 50 to about 8,000,000, about 50 to about 7,000,000, about 50 to about 6,000,000, about 50 to about 5,000,000, about 50 to about 4,000,000, about 50 to about 3,000,000, about 50 to about 2,000,000, about 50 to about 1,000,000, about 50 to about 800,000, about 50 to about 600,000, about 50 to about 400,000, about 50 to about 200,000, about 50 to about 100,000, about 50 to about 80,000, about 50 to about 80,000, about 50 to about 75,000, about 50 to about 70,000, about 50 to about 65,000, about 50 to about 60,000, about 50 to about 55,000, about 50 to about 50,000, about 50 to about 45,000, about 50 to about 40,000, about 50 to about 35,000, about 50 to about 30,000, about 50 to about 25,000, about 50 to about 20,000, about 50 to about 15,000, about 50 to about 10,000, about 50 to about 7,500, about 50 to about 5,000, about 50 to about 4,000, about 50 to about 3,000, about 50 to about 2,000, about 50 to about 1,000, about 50 to about 500, about 50 to about 100, about 100 to about 10,000,000, about 100 to about 9,000,000, about 100 to about 8,000,000, about 100 to about 7,000,000, about 100 to about 6,000,000, about 100 to about 5,000,000, about 100 to about 4,000,000, about 100 to about 3,000,000, about 100 to about 2,000,000, about 100 to about 1,000,000, about 100 to about 800,000, about 100 to about 600,000, about 100 to about 400,000, about 100 to about 200,000, about 100 to about 100,000, about 100 to about 80,000, about 100 to about 75,000, about 100 to about 70,000, about 100 to about 65,000, about 100 to about 60,000, about 100 to about 55,000, about 100 to about 50,000, about 100 to about 45,000, about 100 to about 40,000, about 100 to about 35,000, about 100 to about 30,000, about 100 to about 25,000, about 100 to about 20,000, about 100 to about 15,000, about 100 to about 10,000, about 100 to about 7,500, about 100 to about 5,000, about 100 to about 4,000, about 100 to about 3,000, about 100 to about 2,000, about 100 to about 1,000, about 100 to about 500, about 500 to about 10,000,000, about 500 to about 9,000,000, about 500 to about 8,000,000, about 500 to about 7,000,000, about 500 to about 6,000,000, about 500 to about 5,000,000, about 500 to about 4,000,000, about 500 to about 3,000,000, about 500 to about 2,000,000, about 500 to about 1,000,000, about 500 to about 800,000, about 500 to about 600,000, about 500 to about 400,000, about 500 to about 200,000, about 500 to about 100,000, about 500 to about 80,000, about 500 to about 75,000, about 500 to about 70,000, about 500 to about 65,000, about 500 to about 60,000, about 500 to about 55,000, about 500 to about 50,000, about 500 to about 45,000, about 500 to about 40,000, about 500 to about 35,000, about 500 to about 30,000, about 500 to about 25,000, about 500 to about 20,000, about 500 to about 15,000, about 500 to about 10,000, about 500 to about 7,500, about 500 to about 5,000, about 500 to about 4,000, about 500 to about 3,000, about 500 to about 2,000, about 500 to about 1,000, about 1,000 to about 10,000,000, about 1,000 to about 9,000,000, about 1,000 to about 8,000,000, about 1,000 to about 7,000,000, about 1,000 to about 6,000,000, about 1,000 to about 5,000,000, about 1,000 to about 4,000,000, about 1,000 to about 3,000,000, about 1,000 to about 2,000,000, about 1,000 to about 1,000,000, about 1,000 to about 800,000, about 1,000 to about 600,000, about 1,000 to about 400,000, about 1,000 to about 200,000, about 1,000 to about 100,000, about 1,000 to about 80,000, about 1,000 to about 75,000, about 1,000 to about 70,000, about 1,000 to about 65,000, about 1,000 to about 60,000, about 1,000 to about 55,000, about 1,000 to about 50,000, about 1,000 to about 45,000, about 1,000 to about 40,000, about 1,000 to about 35,000, about 1,000 to about 30,000, about 1,000 to about 25,000, about 1,000 to about 20,000, about 1,000 to about 15,000, about 1,000 to about 10,000, about 1,000 to about 7,500, about 1,000 to about 5,000, about 1,000 to about 4,000, about 1,000 to about 3,000, about 1,000 to about 2,000, about 2,000 to about 10,000,000, about 2,000 to about 9,000,000, about 2,000 to about 8,000,000, about 2,000 to about 7,000,000, about 2,000 to about 6,000,000, about 2,000 to about 5,000,000, about 2,000 to about 4,000,000, about 2,000 to about 3,000,000, about 2,000 to about 2,000,000, about 2,000 to about 1,000,000, about 2,000 to about 800,000, about 2,000 to about 600,000, about 2,000 to about 400,000, about 2,000 to about 200,000, about 2,000 to about 100,000, about 2,000 to about 80,000, about 2,000 to about 75,000, about 2,000 to about 70,000, about 2,000 to about 65,000, about 2,000 to about 60,000, about 2,000 to about 55,000, about 2,000 to about 50,000, about 2,000 to about 45,000, about 2,000 to about 40,000, about 2,000 to about 35,000, about 2,000 to about 30,000, about 2,000 to about 25,000, about 2,000 to about 20,000, about 2,000 to about 15,000, about 2,000 to about 10,000, about 2,000 to about 7,500, about 2,000 to about 5,000, about 2,000 to about 4,000, about 2,000 to about 3,000, about 3,000 to about 10,000,000, about 3,000 to about 9,000,000, about 3,000 to about 8,000,000, about 3,000 to about 7,000,000, about 3,000 to about 6,000,000, about 3,000 to about 5,000,000, about 3,000 to about 4,000,000, about 3,000 to about 3,000,000, about 3,000 to about 2,000,000, about 3,000 to about 1,000,000, about 3,000 to about 800,000, about 3,000 to about 600,000, about 3,000 to about 400,000, about 3,000 to about 200,000, about 3,000 to about 100,000, about 3,000 to about 80,000, about 3,000 to about 75,000, about 3,000 to about 70,000, about 3,000 to about 65,000, about 3,000 to about 60,000, about 3,000 to about 55,000, about 3,000 to about 50,000, about 3,000 to about 45,000, about 3,000 to about 40,000, about 3,000 to about 35,000, about 3,000 to about 30,000, about 3,000 to about 25,000, about 3,000 to about 20,000, about 3,000 to about 15,000, about 3,000 to about 10,000, about 3,000 to about 7,500, about 3,000 to about 5,000, about 3,000 to about 4,000, about 4,000 to about 10,000,000, about 4,000 to about 9,000,000, about 4,000 to about 8,000,000, about 4,000 to about 7,000,000, about 4,000 to about 6,000,000, about 4,000 to about 5,000,000, about 4,000 to about 4,000,000, about 4,000 to about 3,000,000, about 4,000 to about 2,000,000, about 4,000 to about 1,000,000, about 4,000 to about 800,000, about 4,000 to about 600,000, about 4,000 to about 400,000, about 4,000 to about 200,000, about 4,000 to about 100,000, about 4,000 to about 80,000, about 4,000 to about 75,000, about 4,000 to about 70,000, about 4,000 to about 65,000, about 4,000 to about 60,000, about 4,000 to about 55,000, about 4,000 to about 50,000, about 4,000 to about 45,000, about 4,000 to about 40,000, about 4,000 to about 35,000, about 4,000 to about 30,000, about 4,000 to about 25,000, about 4,000 to about 20,000, about 4,000 to about 15,000, about 4,000 to about 10,000, about 4,000 to about 7,500, about 4,000 to about 5,000, about 5,000 to about 10,000,000, about 5,000 to about 9,000,000, about 5,000 to about 8,000,000, about 5,000 to about 7,000,000, about 5,000 to about 6,000,000, about 5,000 to about 5,000,000, about 5,000 to about 4,000,000, about 5,000 to about 3,000,000, about 5,000 to about 2,000,000, about 5,000 to about 1,000,000, about 5,000 to about 800,000, about 5,000 to about 600,000, about 5,000 to about 400,000, about 5,000 to about 200,000, about 5,000 to about 100,000, about 5,000 to about 80,000, about 5,000 to about 75,000, about 5,000 to about 70,000, about 5,000 to about 65,000, about 5,000 to about 60,000, about 5,000 to about 55,000, about 5,000 to about 50,000, about 5,000 to about 45,000, about 5,000 to about 40,000, about 5,000 to about 35,000, about 5,000 to about 30,000, about 5,000 to about 25,000, about 5,000 to about 20,000, about 5,000 to about 15,000, about 5,000 to about 10,000, about 5,000 to about 7,500, about 7,500 to about 10,000,000, about 7,500 to about 9,000,000, about 7,500 to about 8,000,000, about 7,500 to about 7,000,000, about 7,500 to about 6,000,000, about 7,500 to about 5,000,000, about 7,500 to about 4,000,000, about 7,500 to about 3,000,000, about 7,500 to about 2,000,000, about 7,500 to about 1,000,000, about 7,500 to about 800,000, about 7,500 to about 600,000, about 7,500 to about 400,000, about 7,500 to about 200,000, about 7,500 to about 100,000, about 7,500 to about 80,000, about 7,500 to about 75,000, about 7,500 to about 70,000, about 7,500 to about 65,000, about 7,500 to about 60,000, about 7,500 to about 55,000, about 7,500 to about 50,000, about 7,500 to about 45,000, about 7,500 to about 40,000, about 7,500 to about 35,000, about 7,500 to about 30,000, about 7,500 to about 25,000, about 7,500 to about 20,000, about 7,500 to about 15,000, about 7,500 to about 10,000, about 10,000 to about 10,000,000, about 10,000 to about 9,000,000, about 10,000 to about 8,000,000, about 10,000 to about 7,000,000, about 10,000 to about 6,000,000, about 10,000 to about 5,000,000, about 10,000 to about 4,000,000, about 10,000 to about 3,000,000, about 10,000 to about 2,000,000, about 10,000 to about 1,000,000, about 10,000 to about 800,000, about 10,000 to about 600,000, about 10,000 to about 400,000, about 10,000 to about 200,000, about 10,000 to about 100,000, about 10,000 to about 80,000, about 10,000 to about 75,000, about 10,000 to about 70,000, about 10,000 to about 65,000, about 10,000 to about 60,000, about 10,000 to about 55,000, about 10,000 to about 50,000, about 10,000 to about 45,000, about 10,000 to about 40,000, about 10,000 to about 35,000, about 10,000 to about 30,000, about 10,000 to about 25,000, about 10,000 to about 20,000, about 10,000 to about 15,000, about 15,000 to about 10,000,000, about 15,000 to about 9,000,000, about 15,000 to about 8,000,000, about 15,000 to about 7,000,000, about 15,000 to about 6,000,000, about 15,000 to about 5,000,000, about 15,000 to about 4,000,000, about 15,000 to about 3,000,000, about 15,000 to about 2,000,000, about 15,000 to about 1,000,000, about 15,000 to about 800,000, about 15,000 to about 600,000, about 15,000 to about 400,000, about 15,000 to about 200,000, about 15,000 to about 100,000, about 15,000 to about 80,000, about 15,000 to about 75,000, about 15,000 to about 70,000, about 15,000 to about 65,000, about 15,000 to about 60,000, about 15,000 to about 55,000, about 15,000 to about 50,000, about 15,000 to about 45,000, about 15,000 to about 40,000, about 15,000 to about 35,000, about 15,000 to about 30,000, about 15,000 to about 25,000, about 15,000 to about 20,000, about 20,000 to about 10,000,000, about 20,000 to about 9,000,000, about 20,000 to about 8,000,000, about 20,000 to about 7,000,000, about 20,000 to about 6,000,000, about 20,000 to about 5,000,000, about 20,000 to about 4,000,000, about 20,000 to about 3,000,000, about 20,000 to about 2,000,000, about 20,000 to about 1,000,000, about 20,000 to about 800,000, about 20,000 to about 600,000, about 20,000 to about 400,000, about 20,000 to about 200,000, about 20,000 to about 100,000, about 20,000 to about 80,000, about 20,000 to about 75,000, about 20,000 to about 70,000, about 20,000 to about 65,000, about 210,000 to about 60,000, about 20,000 to about 55,000, about 20,000 to about 50,000, about 20,000 to about 45,000, about 20,000 to about 40,000, about 20,000 to about 35,000, about 20,000 to about 30,000, about 20,000 to about 25,000, about 25,000 to about 10,000,000, about 25,000 to about 9,000,000, about 25,000 to about 8,000,000, about 25,000 to about 7,000,000, about 25,000 to about 6,000,000, about 25,000 to about 5,000,000, about 25,000 to about 4,000,000, about 25,000 to about 3,000,000, about 25,000 to about 2,000,000, about 25,000 to about 1,000,000, about 25,000 to about 800,000, about 25,000 to about 600,000, about 25,000 to about 400,000, about 25,000 to about 200,000, about 25,000 to about 100,000, about 25,000 to about 80,000, about 25,000 to about 75,000, about 25,000 to about 70,000, about 25,000 to about 65,000, about 25,000 to about 60,000, about 25,000 to about 55,000, about 25,000 to about 50,000, about 25,000 to about 45,000, about 25,000 to about 40,000, about 25,000 to about 35,000, about 25,000 to about 30,000, about 30,000 to about 10,000,000, about 30,000 to about 9,000,000, about 30,000 to about 8,000,000, about 30,000 to about 7,000,000, about 30,000 to about 6,000,000, about 30,000 to about 5,000,000, about 30,000 to about 4,000,000, about 30,000 to about 3,000,000, about 30,000 to about 2,000,000, about 30,000 to about 1,000,000, about 30,000 to about 800,000, about 30,000 to about 600,000, about 30,000 to about 400,000, about 30,000 to about 200,000, about 30,000 to about 100,000, about 30,000 to about 80,000, about 30,000 to about 75,000, about 30,000 to about 70,000, about 30,000 to about 65,000, about 30,000 to about 60,000, about 30,000 to about 55,000, about 30,000 to about 50,000, about 30,000 to about 45,000, about 30,000 to about 40,000, about 30,000 to about 35,000, about 35,000 to about 10,000,000, about 35,000 to about 9,000,000, about 35,000 to about 8,000,000, about 35,000 to about 7,000,000, about 35,000 to about 6,000,000, about 35,000 to about 5,000,000, about 35,000 to about 4,000,000, about 35,000 to about 3,000,000, about 35,000 to about 2,000,000, about 35,000 to about 1,000,000, about 35,000 to about 800,000, about 35,000 to about 600,000, about 35,000 to about 400,000, about 35,000 to about 200,000, about 35,000 to about 100,000, about 35,000 to about 80,000, about 35,000 to about 75,000, about 35,000 to about 70,000, about 35,000 to about 65,000, about 35,000 to about 60,000, about 35,000 to about 55,000, about 35,000 to about 50,000, about 35,000 to about 45,000, about 35,000 to about 40,000, about 40,000 to about 10,000,000, about 40,000 to about 9,000,000, about 40,000 to about 8,000,000, about 40,000 to about 7,000,000, about 40,000 to about 6,000,000, about 40,000 to about 5,000,000, about 40,000 to about 4,000,000, about 40,000 to about 3,000,000, about 40,000 to about 2,000,000, about 40,000 to about 1,000,000, about 40,000 to about 800,000, about 40,000 to about 600,000, about 40,000 to about 400,000, about 40,000 to about 200,000, about 40,000 to about 100,000, about 40,000 to about 80,000, about 40,000 to about 75,000, about 40,000 to about 70,000, about 40,000 to about 65,000, about 40,000 to about 60,000, about 40,000 to about 55,000, about 40,000 to about 50,000, about 40,000 to about 45,000, about 45,000 to about 10,000,000, about 45,000 to about 9,000,000, about 45,000 to about 8,000,000, about 45,000 to about 7,000,000, about 45,000 to about 6,000,000, about 45,000 to about 5,000,000, about 45,000 to about 4,000,000, about 45,000 to about 3,000,000, about 45,000 to about 2,000,000, about 45,000 to about 1,000,000, about 45,000 to about 800,000, about 45,000 to about 600,000, about 45,000 to about 400,000, about 45,000 to about 200,000, about 45,000 to about 100,000, about 45,000 to about 80,000, about 45,000 to about 75,000, about 45,000 to about 70,000, about 45,000 to about 65,000, about 45,000 to about 60,000, about 45,000 to about 55,000, about 45,000 to about 50,000, about 50,000 to about 10,000,000, about 50,000 to about 9,000,000, about 50,000 to about 8,000,000, about 50,000 to about 7,000,000, about 50,000 to about 6,000,000, about 50,000 to about 5,000,000, about 50,000 to about 4,000,000, about 50,000 to about 3,000,000, about 50,000 to about 2,000,000, about 50,000 to about 1,000,000, about 50,000 to about 800,000, about 50,000 to about 600,000, about 50,000 to about 400,000, about 50,000 to about 200,000, about 50,000 to about 100,000, about 50,000 to about 80,000, about 50,000 to about 75,000, about 50,000 to about 70,000, about 50,000 to about 65,000, about 50,000 to about 60,000, about 50,000 to about 55,000, about 55,000 to about 10,000,000, about 55,000 to about 9,000,000, about 55,000 to about 8,000,000, about 55,000 to about 7,000,000, about 55,000 to about 6,000,000, about 55,000 to about 5,000,000, about 55,000 to about 4,000,000, about 55,000 to about 3,000,000, about 55,000 to about 2,000,000, about 55,000 to about 1,000,000, about 55,000 to about 800,000, about 55,000 to about 600,000, about 55,000 to about 400,000, about 55,000 to about 200,000, about 55,000 to about 100,000, about 55,000 to about 80,000, about 55,000 to about 75,000, about 55,000 to about 70,000, about 55,000 to about 65,000, about 55,000 to about 60,000, about 60,000 to about 10,000,000, about 60,000 to about 9,000,000, about 60,000 to about 8,000,000, about 60,000 to about 7,000,000, about 60,000 to about 6,000,000, about 60,000 to about 5,000,000, about 60,000 to about 4,000,000, about 60,000 to about 3,000,000, about 60,000 to about 2,000,000, about 60,000 to about 1,000,000, about 60,000 to about 800,000, about 60,000 to about 600,000, about 60,000 to about 400,000, about 60,000 to about 200,000, about 60,000 to about 100,000, about 60,000 to about 80,000, about 60,000 to about 75,000, about 60,000 to about 70,000, about 60,000 to about 65,000, about 65,000 to about 10,000,000, about 65,000 to about 9,000,000, about 65,000 to about 8,000,000, about 65,000 to about 7,000,000, about 65,000 to about 6,000,000, about 65,000 to about 5,000,000, about 65,000 to about 4,000,000, about 65,000 to about 3,000,000, about 65,000 to about 2,000,000, about 65,000 to about 1,000,000, about 65,000 to about 800,000, about 65,000 to about 600,000, about 65,000 to about 400,000, about 65,000 to about 200,000, about 65,000 to about 100,000, about 65,000 to about 80,000, about 65,000 to about 75,000, about 65,000 to about 70,000, about 70,000 to about 10,000,000, about 70,000 to about 9,000,000, about 70,000 to about 8,000,000, about 70,000 to about 7,000,000, about 70,000 to about 6,000,000, about 70,000 to about 5,000,000, about 70,000 to about 4,000,000, about 70,000 to about 3,000,000, about 70,000 to about 2,000,000, about 70,000 to about 1,000,000, about 70,000 to about 800,000, about 70,000 to about 600,000, about 70,000 to about 400,000, about 70,000 to about 200,000, about 70,000 to about 100,000, about 70,000 to about 90,000, about 70,000 to about 80,000, about 80,000 to about 10,000,000, about 80,000 to about 9,000,000, about 80,000 to about 8,000,000, about 80,000 to about 7,000,000, about 80,000 to about 6,000,000, about 80,000 to about 5,000,000, about 80,000 to about 4,000,000, about 80,000 to about 3,000,000, about 80,000 to about 2,000,000, about 80,000 to about 1,000,000, about 80,000 to about 800,000, about 80,000 to about 600,000, about 80,000 to about 400,000, about 80,000 to about 200,000, about 80,000 to about 100,000, about 80,000 to about 90,000, about 90,000 to about 10,000,000, about 90,000 to about 9,000,000, about 90,000 to about 8,000,000, about 90,000 to about 7,000,000, about 90,000 to about 6,000,000, about 90,000 to about 5,000,000, about 90,000 to about 4,000,000, about 90,000 to about 3,000,000, about 90,000 to about 2,000,000, about 90,000 to about 1,000,000, about 90,000 to about 800,000, about 90,000 to about 600,000, about 90,000 to about 400,000, about 90,000 to about 200,000, about 90,000 to about 100,000, about 100,000 to about 10,000,000, about 100,000 to about 9,000,000, about 100,000 to about 8,000,000, about 100,000 to about 7,000,000, about 100,000 to about 6,000,000, about 100,000 to about 5,000,000, about 100,000 to about 4,000,000, about 100,000 to about 3,000,000, about 100,000 to about 2,000,000, about 100,000 to about 1,000,000, about 100,000 to about 800,000, about 100,000 to about 600,000, about 100,000 to about 400,000, about 100,000 to about 200,000, about 200,000 to about 10,000,000, about 200,000 to about 9,000,000, about 200,000 to about 8,000,000, about 200,000 to about 7,000,000, about 200,000 to about 6,000,000, about 200,000 to about 5,000,000, about 200,000 to about 4,000,000, about 200,000 to about 3,000,000, about 200,000 to about 2,000,000, about 200,000 to about 1,000,000, about 200,000 to about 800,000, about 200,000 to about 600,000, about 200,000 to about 400,000, about 400,000 to about 10,000,000, about 400,000 to about 9,000,000, about 400,000 to about 8,000,000, about 400,000 to about 7,000,000, about 400,000 to about 6,000,000, about 400,000 to about 5,000,000, about 400,000 to about 4,000,000, about 400,000 to about 3,000,000, about 400,000 to about 2,000,000, about 400,000 to about 1,000,000, about 400,000 to about 800,000, about 400,000 to about 600,000, about 600,000 to about 10,000,000, about 600,000 to about 9,000,000, about 600,000 to about 8,000,000, about 600,000 to about 7,000,000, about 600,000 to about 6,000,000, about 600,000 to about 5,000,000, about 600,000 to about 4,000,000, about 600,000 to about 3,000,000, about 600,000 to about 2,000,000, about 600,000 to about 1,000,000, about 600,000 to about 800,000, about 800,000 to about 10,000,000, about 800,000 to about 9,000,000, about 800,000 to about 8,000,000, about 800,000 to about 7,000,000, about 800,000 to about 6,000,000, about 800,000 to about 5,000,000, about 800,000 to about 4,000,000, about 800,000 to about 3,000,000, about 800,000 to about 2,000,000, about 800,000 to about 1,000,000, about 1,000,000 to about 10,000,000, about 1,000,000 to about 9,000,000, about 1,000,000 to about 8,000,000, about 1,000,000 to about 7,000,000, about 1,000,000 to about 6,000,000, about 1,000,000 to about 5,000,000, about 1,000,000 to about 4,000,000, about 1,000,000 to about 3,000,000, about 1,000,000 to about 2,000,000, about 2,000,000 to about 10,000,000, about 2,000,000 to about 9,000,000, about 2,000,000 to about 8,000,000, about 2,000,000 to about 7,000,000, about 2,000,000 to about 6,000,000, about 2,000,000 to about 5,000,000, about 2,000,000 to about 4,000,000, about 2,000,000 to about 3,000,000, about 3,000,000 to about 10,000,000, about 3,000,000 to about 9,000,000, about 3,000,000 to about 8,000,000, about 3,000,000 to about 7,000,000, about 3,000,000 to about 6,000,000, about 3,000,000 to about 5,000,000, about 3,000,000 to about 4,000,000, about 4,000,000 to about 10,000,000, about 4,000,000 to about 9,000,000, about 4,000,000 to about 8,000,000, about 4,000,000 to about 7,000,000, about 4,000,000 to about 6,000,000, about 4,000,000 to about 5,000,000, about 5,000,000 to about 10,000,000, about 5,000,000 to about 9,000,000, about 5,000,000 to about 8,000,000, about 5,000,000 to about 7,000,000, about 5,000,000 to about 6,000,000, about 6,000,000 to about 10,000,000, about 6,000,000 to about 9,000,000, about 6,000,000 to about 8,000,000, about 6,000,000 to about 7,000,000, about 7,000,000 to about 10,000,000, about 7,000,000 to about 9,000,000, about 7,000,000 to about 8,000,000, about 8,000,000 to about 10,000,000, about 8,000,000 to about 9,000,000, or about 9,000,000 to about 10,000,000 of the DLL3 on present on the plasma membrane of the target mammalian cell.

[0067] The phrase “antigen density” means the number of DLL3 present on the surface of a target mammalian cell or the average number of DLL3 on the surface of a population of particular type of target mammalian cells. It can be measured, e.g., using the Quantibright bead kit or radiolabel (e.g., BD Biosciences PE Phycoerythrin Fluorescence Quantitation Kit, catalog #340495).

[0068] The phrase “amino acid substituted with a histidine” means the substitution of an amino acid residue that is not histidine in a reference polypeptide sequence with a histidine. Non-limiting methods for substituting an amino acid residue in a reference polypeptide with a histidine are described herein. Additional methods for substituting an amino acid residue in a reference polypeptide with a histidine are known in the art.

[0069] The phrase “amino acid substituted with an alanine” means the substitution of an amino acid residue that is a histidine in a reference polypeptide sequence with an alanine. Non-limiting methods for substituting a histidine in a reference polypeptide with an alanine are described herein. Additional methods for substituting a histidine in a reference polypeptide with an alanine are known in the art.

[0070] Unless otherwise defined, all technical and scientific terms used herein have the same meaning as commonly understood by one of ordinary skill in the art to which this invention belongs. Methods and materials are described herein for use in the present invention; other, suitable methods and materials known in the art can also be used. The materials, methods, and examples are illustrative only and not intended to be limiting. All publications, patent applications, patents, sequences, database entries, and other references mentioned herein are incorporated by reference in their entirety. In case of conflict, the present specification, including definitions, will control.

[0071] Other features and advantages of the invention will be apparent from the following detailed description and figures, and from the claims.

### BRIEF DESCRIPTION OF DRAWINGS

[0072] FIG. 1: SDS PAGE for rovalpituzumab histidine scanning and alanine scanning. Expi293 cell culture supernatants post-harvest were loaded on non-reduced SDS PAGE gels to confirm expression of rovalpituzumab and histidine scanning and alanine scanning variants. Arrows show the corresponding size for an IgG on a non-reduced SDS PAGE gel. MYT0638 is rovalpituzumab and the rest of the lanes (MYT0639-MYT0679) are rovalpituzumab heavy chain histidine scanning and alanine scanning variants.

[0073] FIG. 2: SDS PAGE for rovalpituzumab histidine scanning and alanine scanning. Expi293 cell culture supernatants post-harvest were loaded on non-reduced SDS PAGE gels to confirm expression of ROVALPITUZUMAB and histidine scanning and alanine scanning variants. Arrows show the corresponding size for an IgG on a non-reduced SDS PAGE gel. MYT0638 is ROVALPITUZUMAB and the rest of the lanes (MYT1532-MYT1558) are ROVALPITUZUMAB light chain histidine scanning and alanine scanning variants.

[0074] FIG. 3: SDS PAGE for ROVALPITUZUMAB histidine scanning and alanine scanning. Expi293 cell culture supernatants post-harvest were loaded on non-reduced SDS PAGE gels to confirm expression of ROVALPITUZUMAB and histidine scanning and alanine scanning variants. Arrows show the corresponding size for an IgG on a non-reduced SDS PAGE gel. MYT1183, MYT1186, MYT1187, MYT1188, MYT1189, MYT1190, MYT1192, MYT1198, MYT1199, MYT1200, and MYT1201 are ROVALPITUZUMAB heavy chain combinations histidine scanning and alanine scanning variants.

[0075] FIGS. 4ai to 4aq: Binding of rovalpituzumab starting ABPC and histidine scanning and alanine scanning variants to DLL3 by biolayer interferometry. MYT0638 (rovalpituzumab) and MYT639-MYT0679, heavy chain histidine scanning and alanine scanning variants, were captured on anti-human Fc biosensors and associated with DLL3 at low pH or high pH, as specified in the figures. Some figures show one or more flat curve(s), which represent reference conditions where no antibody was loaded on the sensor.

[0076] FIGS. 5a to 5ac: Binding of ROVALPITUZUMAB starting ABPC and histidine scanning and alanine scanning variants to DLL3 by biolayer interferometry. MYT0638 (rovalpituzumab) and MYT1532-MYT1558, light chain histidine scanning and alanine scanning variants, were captured on anti-human Fc biosensors and associated with DLL3 at low pH or high pH, as specified in the figures. Some figures show one or more flat curve(s), which represent reference conditions where no antibody was loaded on the sensor.

[0077] FIGS. 6a-6q: Binding of ROVALPITUZUMAB starting ABPC and histidine scanning and alanine scanning variants to DLL3 by biolayer interferometry. MYT0638 (rovalpituzumab), and MYT0645, MYT0647, MYT0656, MYT0677 (heavy chain histidine scanning and alanine scanning variants), and MYT1183, MYT1186, MYT1187, MYT1188, MYT1189, MYT1190, MYT1192, MYT1198, MYT1199, MYT1200, and MYT1201 (heavy chain combinations histidine scanning and alanine scanning variants) were captured on anti-human Fc biosensors and associated with DLL3 at low pH or high pH, as specified in the figures. Some figures show one or more flat curve(s), which represent reference conditions where no antibody was loaded on the sensor.

[0078] FIG. 7: Construct identifier to SEQ ID NO correspondence table. Constructs, heavy chain histidine scanning and alanine scanning variants, are listed in the first column of the table, SEQ ID NOs are listed and correspond to constructs on the left and the appropriate heavy chain, light chain, and CDR categories along the top.

[0079] FIG. 8: Construct identifier to SEQ ID NO correspondence table. Constructs, light chain histidine scanning and alanine scanning variants, are listed in the first column of the table, SEQ ID NOs are listed and correspond to constructs on the left and the appropriate heavy chain, light chain, and CDR categories along the top.

[0080] FIG. 9: Construct identifier to SEQ ID NO correspondence table. Constructs, heavy chain combinations histidine scanning and alanine scanning variants, are listed in the first column of the table, SEQ ID NOs are listed and correspond to constructs on the left and the appropriate heavy chain, light chain, and CDR categories along the top.

[0081] FIG. 10: Construct identifier to SEQ ID NO correspondence table. Constructs, light chain combination histidine scanning and alanine scanning variants, are listed in the first column of the table, SEQ ID NOs are listed and correspond to constructs on the left and the appropriate heavy chain, light chain, and CDR categories along the top.

[0082] FIG. 11: Construct identifier to SEQ ID NO correspondence table. Constructs, paired heavy and light chain variants, combining light chain histidine and alanine scanning variants with heavy chain histidine and alanine scanning variants or heavy chain combination histidine scanning and alanine scanning variants, are listed in the first column of the table, SEQ ID NOs are listed and correspond to constructs on the left and the appropriate heavy chain, light chain, and CDR categories along the top.

[0083] FIG. 12: SDS PAGE for ROVALPITUZUMAB histidine scanning and alanine scanning. Expi293 cell culture supernatants post-harvest were loaded on non-reduced SDS PAGE gels to confirm expression of ROVALPITUZUMAB histidine scanning and alanine scanning variants. Arrows show the corresponding size for an IgG on a non-reduced SDS PAGE gel. MYT4262-MYT4281 are ROVALPITUZUMAB light chain combinations histidine scanning and alanine scanning variants.

[0084] FIGS. 13a to 13t: Binding of histidine scanning and alanine scanning variants of ROVALPITUZUMAB to DLL3 by biolayer interferometry. MYT4262-MYT4281, light chain combination histidine scanning and alanine scanning variants, were captured on anti-human Fc biosensors and associated with DLL3 at low pH or high pH, as specified in the figures.

[0085] FIG. 14: SDS PAGE for ROVALPITUZUMAB histidine scanning and alanine scanning. Expi293 cell culture supernatants post-harvest were loaded on non-reduced SDS PAGE gels to confirm expression of ROVALPITUZUMAB histidine scanning and alanine scanning variants. Arrows show the corresponding size for an IgG on a non-reduced SDS PAGE gel. MYT2800-MYT2845 are ROVALPITUZUMAB paired heavy and light chain variants, combining light chain histidine and alanine scanning variants with heavy chain histidine and alanine scanning variants or heavy chain combination histidine scanning and alanine scanning variants.

[0086] FIGS. 15a to 15at: Binding of histidine scanning and alanine scanning variants of ROVALPITUZUMAB to DLL3 by biolayer interferometry. MYT2800-MYT2845, paired heavy and light chain variants, combining light chain histidine and alanine scanning variants with heavy chain histidine and alanine scanning variants or heavy chain combination histidine scanning and alanine scanning variants, were captured on anti-human Fc biosensors and associated with DLL3 at low pH or high pH, as specified in the figures.

[0087] FIGS. 16a-j: Internalization of anti-DLL3 mAbs in NCI-1182 cells. Anti-DLL3 pH engineered antibody variants, corresponding starting ABPC antibodies, control IgG1 isotype control (BP0297, Bioxcell), along with a vehicle control, as specified in FIGS. 16a-j were assayed for internalization and endolysosomal delivery as measured by mean fluorescence intensity on NCI-H82 cells at 24 hours. Error bars represent standard deviation. Numbers above the bars represent fold change over wild-type.

[0088] FIGS. 17a-b: SDS PAGE for anti-DLL3 VH-Fc and VH-Fc converted to-IgG molecules. Expi293 cell culture supernatants post-harvest were loaded on non-reduced SDS PAGE gels to confirm expression of VH-Fc and VH-Fc converted to IgG. Arrows show the corresponding size for VH-Fc and IgG on a non-reduced SDS PAGE gel. MYT1044, MYT1047, MYT1048, MYT1050, MYT1052, MYT1053, MYT1054, MYT1055, MYT1056, MYT1057, MYT1059, MYT1060, MYT1061, MYT1062, MYT1063 are VH-Fc and MYT4373-4384 are IgG.

[0089] FIGS. 18a-ab: Binding of anti-DLL3 VH-Fc and VH-Fc converted to IgG molecules to DLL3 by biolayer interferometry. Rovalpituzumab (MYT0638), and MYT1044, MYT1047, MYT1048, MYT1050, MYT1052, MYT1053, MYT1054, MYT1055, MYT1056, MYT1057, MYT1059, MYT1060, MYT1061, MYT1062, MYT1063, VH-Fc molecules, and MYT4373-4384, IgG molecules, were captured on anti-human Fc biosensors and associated with DLL3 at low pH or high pH, as specified in the figures.

[0090] FIG. 19: Epitope binning of anti-DLL3 VH-Fc molecules. Biolayer interferometry was used to map the epitopes of anti-DLL3 VH-Fc molecules through competition with antibodies of known epitopes. The columns represent the different antibodies of a known epitope used to capture DLL3 while the rows represent the different VH-Fc constructs whose epitopes were being investigated. An X represents observed competition as measured by a greater than 30% decrease in binding to DLL3 when captured by a known antibody as compared to the same sample when measured against the maximum extent of binding obtained with any other known antibodies.

[0091] FIGS. 20a-c: Characterization of binding affinity for anti-DLL3 mAbs. Anti-DLL3 mAbs were assayed for their binding to NCI-H82 cells. FIG. 20a shows ROVALPITUZUMAB with an IC50 of 0.008 nM, FIG. 20b shows MYT2829 with an IC50 of 0.015 nM, FIG. 20c shows MYT1193 with an IC50 of 0.185 nM.

[0092] FIGS. 21a-d: Melting temperature of select anti-DLL3 mAbs. Anti-DLL3 mAbs were assayed for their melting temperature by Differential Scanning Flourimetry (DSF), and the resulting Sypro Orange signal was plotted as its first derivative. Melting temperature (Tm) was calculated as the local maxima of this graph. FIG. 21a; ROVALPITUZUMAB, Tm 69.5° C. FIG. 21b; MYT1193, Tm 59.9° C., 69.1° C. FIG. 21c; MYT1185, Tm 58.3° C., 69.1° C. FIG. 21d: MYT2829, Tm 67.9° C.

[0093] FIG. 22: Specificity of internalization and endolysosomal delivery of anti-DLL3 mAbs. ROVALPITUZUMAB, MYT1185, MYT1193, MYT1209, and MYT2829, control IgG1 isotype control (BP0297, Bioxcell), along with a vehicle control (“unstained”) were assayed for cell internalization and endolysosomal delivery as measured by mean fluorescence intensity on Raji cells (DLL3-) at 24 h. Errors bars represent standard deviation.

[0094] FIG. 23: SDS PAGE for SC16.4 histidine scanning and alanine scanning. Expi293 cell culture supernatants post-harvest were loaded on non-reduced SDS PAGE gels to confirm expression of SC16.4 and histidine scanning and alanine scanning variants. Arrows show the corresponding size for an IgG on a non-reduced SDS PAGE gel. MYT3047 is SC16.4 and the rest of the lanes (MYT3048-MYT3084) are SC16.4 heavy chain histidine scanning and alanine scanning variants.

[0095] FIGS. 24a to 24al: Binding of SC16.4 starting ABPC and histidine scanning and alanine scanning variants to DLL3 by biolayer interferometry. MYT3047 (SC16.4) and MYT3048-MYT3084, heavy chain histidine scanning and alanine scanning variants, were captured on anti-human Fc biosensors and associated with DLL3 at low pH or high pH, as specified in the figures.

[0096] FIG. 25: SDS PAGE for SC16.4 histidine scanning and alanine scanning. Expi293 cell culture supernatants post-harvest were loaded on non-reduced SDS PAGE gels to confirm expression of SC16.4 and histidine scanning and alanine scanning variants. Arrows show the corresponding size for an IgG on a non-reduced SDS PAGE gel. MYT3047 is SC16.4 and the rest of the lanes (MYT3085-MYT3110, MYT4200) are SC16.4 light chain histidine scanning and alanine scanning variants.

[0097] FIGS. 26a to 26aa: Binding of SC16.4 starting ABPC and histidine scanning and alanine scanning variants to DLL3 by biolayer interferometry. MYT3047 (SC16.4) and MYT3085-MYT3110, MYT4200, light chain histidine scanning and alanine scanning variants, were captured on anti-human Fc biosensors and associated with DLL3 at low pH or high pH, as specified in the figures.

[0098] FIG. 27: SDS PAGE for SC16.4 histidine scanning and alanine scanning. Expi293 cell culture supernatants post-harvest were loaded on non-reduced SDS PAGE gels to confirm expression of SC16.4 histidine scanning and alanine scanning variants. Arrows show the corresponding size for an IgG on a non-reduced SDS PAGE gel. MYT3399-MYT3424 and MYT4175-MYT4189 are SC16.4 heavy chain combinations histidine scanning and alanine scanning variants.

[0099] FIGS. 28a to 28ao: Binding of histidine scanning and alanine scanning variants of SC16.4 to DLL3 by biolayer interferometry. MYT3399-MYT3424 and MYT4175-MYT4189, heavy chain combination histidine scanning and alanine scanning variants, were captured on anti-human Fc biosensors and associated with DLL3 at low pH or high pH, as specified in the figures.

[0100] FIG. 29: SDS PAGE for SC16.4 histidine scanning and alanine scanning. Expi293 cell culture supernatants post-harvest were loaded on non-reduced SDS PAGE gels to confirm expression of SC16.4 histidine scanning and alanine scanning variants. Arrows show the corresponding size for an IgG on a non-reduced SDS PAGE gel. MYT4190-MYT4199 are SC16.4 light chain combinations histidine scanning and alanine scanning variants.

[0101] FIGS. 30a to 30j: Binding of histidine scanning and alanine scanning variants of SC16.4 to DLL3 by biolayer interferometry. MYT4190-MYT4199, light chain combination histidine scanning and alanine scanning variants, were captured on anti-human Fc biosensors and associated with DLL3 at low pH or high pH, as specified in the figures.

[0102] FIGS. 31: SDS PAGE for SC16.4 histidine scanning and alanine scanning. Expi293 cell culture supernatants post-harvest were loaded on non-reduced SDS PAGE gels to confirm expression of SC16.4 histidine scanning and alanine scanning variants. Arrows show the corresponding size for an IgG on a non-reduced SDS PAGE gel. MYT3493-MYT3513 are SC16.4 paired heavy and light chain variants, combining light chain histidine and alanine scanning variants with heavy chain histidine and alanine scanning variants FIGS. 32a to 32u: Binding of histidine scanning and alanine scanning variants of SC16.4 to DLL3 by biolayer interferometry. MYT3493-MYT3513, paired heavy and light chain variants, combining light chain histidine and alanine scanning variants with heavy chain histidine and alanine scanning variants were captured on anti-human Fc biosensors and associated with DLL3 at low pH or high pH, as specified in the figures.

[0103] FIG. 33: SDS PAGE for hSC16.13 histidine scanning and alanine scanning. Expi293 cell culture supernatants post-harvest were loaded on non-reduced SDS PAGE gels to confirm expression of hSC16.13 and histidine scanning and alanine scanning variants. Arrows show the corresponding size for an IgG on a non-reduced SDS PAGE gel. MYT3181 is hSC16.13 and the rest of the lanes (MYT3182-MYT3225) are hSC16.13 heavy chain histidine scanning and alanine scanning variants.

[0104] FIGS. 34a to 34as: Binding of hSC16.13 starting ABPC and histidine scanning and alanine scanning variants to DLL3 by biolayer interferometry. MYT3181 (hSC16.13) and MYT3182-MYT3225, heavy chain histidine scanning and alanine scanning variants, were captured on anti-human Fc biosensors and associated with DLL3 at low pH or high pH, as specified in the figures.

[0105] FIG. 35: SDS PAGE for hSC16.13 histidine scanning and alanine scanning. Expi293 cell culture supernatants post-harvest were loaded on non-reduced SDS PAGE gels to confirm expression of hSC16.13 and histidine scanning and alanine scanning variants. Arrows show the corresponding size for an IgG on a non-reduced SDS PAGE gel. MYT3226-MYT3251 are hSC16.13 light chain histidine scanning and alanine scanning variants.

[0106] FIGS. 36a to 36z: Binding of hSC16.13 starting ABPC and histidine scanning and alanine scanning variants to DLL3 by biolayer interferometry. MYT3181 (hSC16.13) and MYT3226-MYT3251, light chain histidine scanning and alanine scanning variants, were captured on anti-human Fc biosensors and associated with DLL3 at low pH or high pH, as specified in the figures.

[0107] FIG. 37: SDS PAGE for hSC16.13 histidine scanning and alanine scanning. Expi293 cell culture supernatants post-harvest were loaded on non-reduced SDS PAGE gels to confirm expression of hSC16.13 histidine scanning and alanine scanning variants. Arrows show the corresponding size for an IgG on a non-reduced SDS PAGE gel. MYT4346-MYT4371 are hSC16.13 heavy chain combinations histidine scanning and alanine scanning variants.

[0108] FIGS. 38a to 38z: Binding of histidine scanning and alanine scanning variants of hSC16.13 to DLL3 by biolayer interferometry. MYT4346-MYT4371, heavy chain combination histidine scanning and alanine scanning variants, were captured on anti-human Fc biosensors and associated with DLL3 at low pH or high pH, as specified in the figures.

[0109] FIG. 39: SDS PAGE for hSC16.13 histidine scanning and alanine scanning. Expi293 cell culture supernatants post-harvest were loaded on non-reduced SDS PAGE gels to confirm expression of a hSC16.13 histidine scanning and alanine scanning variant. Arrows show the corresponding size for an IgG on a non-reduced SDS PAGE gel. MYT4372 is a hSC16.13 light chain combinations histidine scanning and alanine scanning variant.

[0110] FIG. 40: Binding of histidine scanning and alanine scanning variants of hSC16.13 to DLL3 by biolayer interferometry. MYT4372, a light chain combination histidine scanning and alanine scanning variant, was captured on anti-human Fc biosensors and associated with DLL3 at low pH or high pH, as specified in the figures.

[0111] FIG. 41: SDS PAGE for hSC16.13 histidine scanning and alanine scanning. Expi293 cell culture supernatants post-harvest were loaded on non-reduced SDS PAGE gels to confirm expression of hSC16.13 histidine scanning and alanine scanning variants. Arrows show the corresponding size for an IgG on a non-reduced SDS PAGE gel. MYT3526-MYT3551 are hSC16.13 paired heavy and light chain variants, combining light chain histidine and alanine scanning variants with heavy chain histidine and alanine scanning variants.

[0112] FIGS. 42a to 42z: Binding of histidine scanning and alanine scanning variants of HSC16.13 to DLL3 by biolayer interferometry. MYT3526-MYT3551, paired heavy and light chain variants, combining light chain histidine and alanine scanning variants with heavy chain histidine and alanine scanning variants, were captured on anti-human Fc biosensors and associated with DLL3 at low pH or high pH, as specified in the figures.

[0113] FIG. 43: SDS PAGE for hSC16.15 histidine scanning and alanine scanning. Expi293 cell culture supernatants post-harvest were loaded on non-reduced SDS PAGE gels to confirm expression of hSC16.15 and histidine scanning and alanine scanning variants. Arrows show the corresponding size for an IgG on a non-reduced SDS PAGE gel. MYT3892 is hSC16.15 and the rest of the lanes (MYT3893-MYT3932) are hSC16.15 heavy chain histidine scanning and alanine scanning variants.

[0114] FIGS. 44a to 44ao: Binding of hSC16.15 starting ABPC and histidine scanning and alanine scanning variants to DLL3 by biolayer interferometry. MYT3892 (hSC16.15) and MYT3893-MYT3932, heavy chain histidine scanning and alanine scanning variants, were captured on anti-human Fc biosensors and associated with DLL3 at low pH or high pH, as specified in the figures.

[0115] FIG. 45: SDS PAGE for hSC16.15 histidine scanning and alanine scanning. Expi293 cell culture supernatants post-harvest were loaded on non-reduced SDS PAGE gels to confirm expression of hSC16.15 and histidine scanning and alanine scanning variants. Arrows show the corresponding size for an IgG on a non-reduced SDS PAGE gel. MYT3933-MYT3956 are hSC16.15 light chain histidine scanning and alanine scanning variants.

[0116] FIGS. 46a to 46x: Binding of hSC16.15 starting ABPC and histidine scanning and alanine scanning variants to DLL3 by biolayer interferometry. MYT3933-MYT3956, light chain histidine scanning and alanine scanning variants, were captured on anti-human Fc biosensors and associated with DLL3 at low pH or high pH, as specified in the figures.

[0117] FIG. 47: SDS PAGE for hSC16.25 histidine scanning and alanine scanning. Expi293 cell culture supernatants post-harvest were loaded on non-reduced SDS PAGE gels to confirm expression of hSC16.25 and histidine scanning and alanine scanning variants. Arrows show the corresponding size for an IgG on a non-reduced SDS PAGE gel. MYT3758 is hSC16.25 and the rest of the lanes (MYT3759-MYT3802) are hSC16.25 heavy chain histidine scanning and alanine scanning variants.

[0118] FIGS. 48a to 48as: Binding of hSC16.25 starting ABPC and histidine scanning and alanine scanning variants to DLL3 by biolayer interferometry. MYT3758 (hSC16.25) and MYT3759-MYT3802, heavy chain histidine scanning and alanine scanning variants, were captured on anti-human Fc biosensors and associated with DLL3 at low pH or high pH, as specified in the figures.

[0119] FIG. 49: SDS PAGE for hSC16.25 histidine scanning and alanine scanning. Expi293 cell culture supernatants post-harvest were loaded on non-reduced SDS PAGE gels to confirm expression of hSC16.25 and histidine scanning and alanine scanning variants. Arrows show the corresponding size for an IgG on a non-reduced SDS PAGE gel. MYT3803-MYT3825 are hSC16.25 light chain histidine scanning and alanine scanning variants.

[0120] FIGS. 50a to 50w: Binding of hSC16.25 starting ABPC and histidine scanning and alanine scanning variants to DLL3 by biolayer interferometry. MYT3803-MYT3825, light chain histidine scanning and alanine scanning variants, were captured on anti-human Fc biosensors and associated with DLL3 at low pH or high pH, as specified in the figures.

[0121] FIG. 51: SDS PAGE for hSC16.34 histidine scanning and alanine scanning. Expi293 cell culture supernatants post-harvest were loaded on non-reduced SDS PAGE gels to confirm expression of hSC16.34 and histidine scanning and alanine scanning variants. Arrows show the corresponding size for an IgG on a non-reduced SDS PAGE gel. MYT3826 is hSC16.34 and the rest of the lanes (MYT3827-MYT3867) are hSC16.34 heavy chain histidine scanning and alanine scanning variants.

[0122] FIGS. 52a to 52ap: Binding of hSC16.34 starting ABPC and histidine scanning and alanine scanning variants to DLL3 by biolayer interferometry. MYT3826 (hSC16.34) and MYT3827-MYT3867, heavy chain histidine scanning and alanine scanning variants, were captured on anti-human Fc biosensors and associated with DLL3 at low pH or high pH, as specified in the figures.

[0123] FIG. 53: SDS PAGE for hSC16.34 histidine scanning and alanine scanning. Expi293 cell culture supernatants post-harvest were loaded on non-reduced SDS PAGE gels to confirm expression of hSC16.34 and histidine scanning and alanine scanning variants. Arrows show the corresponding size for an IgG on a non-reduced SDS PAGE gel. MYT3868-MYT3891 are hSC16.34 light chain histidine scanning and alanine scanning variants.

[0124] FIGS. 54a to 54x: Binding of hSC16.34 starting ABPC and histidine scanning and alanine scanning variants to DLL3 by biolayer interferometry. MYT3868-MYT3891, light chain histidine scanning and alanine scanning variants, were captured on anti-human Fc biosensors and associated with DLL3 at low pH or high pH, as specified in the figures.

[0125] FIG. 55: SDS PAGE for SC16.67 histidine scanning and alanine scanning. Expi293 cell culture supernatants post-harvest were loaded on non-reduced SDS PAGE gels to confirm expression of SC16.67 and histidine scanning and alanine scanning variants. Arrows show the corresponding size for an IgG on a non-reduced SDS PAGE gel. MYT3111 is SC16.67 and the rest of the lanes (MYT3112-MYT3148) are SC16.67 heavy chain histidine scanning and alanine scanning variants.

[0126] FIGS. 56a to 56al: Binding of SC16.67 starting ABPC and histidine scanning and alanine scanning variants to DLL3 by biolayer interferometry. MYT3111 (SC16.67) and MYT3112-MYT3148, heavy chain histidine scanning and alanine scanning variants, were captured on anti-human Fc biosensors and associated with DLL3 at low pH or high pH, as specified in the figures.

[0127] FIG. 57: SDS PAGE for SC16.67 histidine scanning and alanine scanning. Expi293 cell culture supernatants post-harvest were loaded on non-reduced SDS PAGE gels to confirm expression of SC16.67 and histidine scanning and alanine scanning variants. Arrows show the corresponding size for an IgG on a non-reduced SDS PAGE gel. MYT3149-MYT3178 are SC16.67 light chain histidine scanning and alanine scanning variants.

[0128] FIGS. 58a to 58ad: Binding of SC16.67 starting ABPC and histidine scanning and alanine scanning variants to DLL3 by biolayer interferometry. MYT3149-MYT3178, light chain histidine scanning and alanine scanning variants, were captured on anti-human Fc biosensors and associated with DLL3 at low pH or high pH, as specified in the figures.

[0129] FIG. 59: SDS PAGE for SC16.67 histidine scanning and alanine scanning. Expi293 cell culture supernatants post-harvest were loaded on non-reduced SDS PAGE gels to confirm expression of SC16.67 histidine scanning and alanine scanning variants. Arrows show the corresponding size for an IgG on a non-reduced SDS PAGE gel. MYT3514-MYT3525 are SC16.67 paired heavy and light chain variants, combining light chain histidine and alanine scanning variants with heavy chain histidine and alanine scanning variants.

[0130] FIGS. 60a to 60l: Binding of histidine scanning and alanine scanning variants of SC16.67 to DLL3 by biolayer interferometry. MYT3514-MYT3525, paired heavy and light chain variants, combining light chain histidine and alanine scanning variants with heavy chain histidine and alanine scanning variants, were captured on anti-human Fc biosensors and associated with DLL3 at low pH or high pH, as specified in the figures.

[0131] FIG. 61: Construct identifier to SEQ ID NO correspondence table. Constructs, heavy chain histidine scanning and alanine scanning variants, are listed in the first column of the table, SEQ ID NOs are listed and correspond to constructs on the left and the appropriate heavy chain and/or light chain categories along the top.

[0132] FIG. 62: Construct identifier to SEQ ID NO correspondence table. Constructs, light chain histidine scanning and alanine scanning variants, are listed in the first column of the table, SEQ ID NOs are listed and correspond to constructs on the left and the appropriate heavy chain and/or light chain categories along the top.

[0133] FIG. 63: Construct identifier to SEQ ID NO correspondence table. Constructs, heavy chain combinations histidine scanning and alanine scanning variants, are listed in the first column of the table, SEQ ID NOs are listed and correspond to constructs on the left and the appropriate heavy chain and/or light chain categories along the top.

[0134] FIG. 64: Construct identifier to SEQ ID NO correspondence table. Constructs, light chain combinations histidine scanning and alanine scanning variants, are listed in the first column of the table, SEQ ID NOs are listed and correspond to constructs on the left and the appropriate heavy chain and/or light chain categories along the top.

[0135] FIG. 65: Construct identifier to SEQ ID NO correspondence table. Constructs, paired heavy and light chain variants, combining light chain histidine and alanine scanning variants with heavy chain histidine and alanine scanning variants are listed in the first column of the table, SEQ ID NOs are listed and correspond to constructs on the left and the appropriate heavy chain and/or light chain categories along the top.

[0136] FIG. 66: Construct identifier to SEQ ID NO correspondence table. Constructs, heavy chain histidine scanning and alanine scanning variants, are listed in the first column of the table, SEQ ID NOs are listed and correspond to constructs on the left and the appropriate heavy chain and/or light chain categories along the top.

[0137] FIG. 67: Construct identifier to SEQ ID NO correspondence table. Constructs, light chain histidine scanning and alanine scanning variants, are listed in the first column of the table, SEQ ID NOs are listed and correspond to constructs on the left and the appropriate heavy chain and/or light chain categories along the top.

[0138] FIG. 68: Construct identifier to SEQ ID NO correspondence table. Constructs, heavy chain combinations histidine scanning and alanine scanning variants, are listed in the first column of the table, SEQ ID NOs are listed and correspond to constructs on the left and the appropriate heavy chain and/or light chain categories along the top.

[0139] FIG. 69: Construct identifier to SEQ ID NO correspondence table. Constructs, light chain combinations histidine scanning and alanine scanning variants, are listed in the first column of the table, SEQ ID NOs are listed and correspond to constructs on the left and the appropriate heavy chain and/or light chain categories along the top.

[0140] FIG. 70: Construct identifier to SEQ ID NO correspondence table. Constructs, paired heavy and light chain variants, combining light chain histidine and alanine scanning variants with heavy chain histidine and alanine scanning variants are listed in the first column of the table, SEQ ID NOs are listed and correspond to constructs on the left and the appropriate heavy chain and/or light chain categories along the top.

[0141] FIG. 71: Construct identifier to SEQ ID NO correspondence table. Constructs, heavy chain histidine scanning and alanine scanning variants, are listed in the first column of the table, SEQ ID NOs are listed and correspond to constructs on the left and the appropriate heavy chain and/or light chain categories along the top.

[0142] FIG. 72: Construct identifier to SEQ ID NO correspondence table. Constructs, light chain histidine scanning and alanine scanning variants, are listed in the first column of the table, SEQ ID NOs are listed and correspond to constructs on the left and the appropriate heavy chain and/or light chain categories along the top.

[0143] FIG. 73: Construct identifier to SEQ ID NO correspondence table. Constructs, heavy chain histidine scanning and alanine scanning variants, are listed in the first column of the table, SEQ ID NOs are listed and correspond to constructs on the left and the appropriate heavy chain and/or light chain categories along the top.

[0144] FIG. 74: Construct identifier to SEQ ID NO correspondence table. Constructs, light chain histidine scanning and alanine scanning variants, are listed in the first column of the table, SEQ ID NOs are listed and correspond to constructs on the left and the appropriate heavy chain and/or light chain categories along the top.

[0145] FIG. 75: Construct identifier to SEQ ID NO correspondence table. Constructs, heavy chain histidine scanning and alanine scanning variants, are listed in the first column of the table, SEQ ID NOs are listed and correspond to constructs on the left and the appropriate heavy chain and/or light chain categories along the top.

[0146] FIG. 76: Construct identifier to SEQ ID NO correspondence table. Constructs, light chain histidine scanning and alanine scanning variants, are listed in the first column of the table, SEQ ID NOs are listed and correspond to constructs on the left and the appropriate heavy chain and/or light chain categories along the top.

[0147] FIG. 77: Construct identifier to SEQ ID NO correspondence table. Constructs, heavy chain histidine scanning and alanine scanning variants, are listed in the first column of the table, SEQ ID NOs are listed and correspond to constructs on the left and the appropriate heavy chain and/or light chain categories along the top.

[0148] FIG. 78: Construct identifier to SEQ ID NO correspondence table. Constructs, light chain histidine scanning and alanine scanning variants, are listed in the first column of the table, SEQ ID NOs are listed and correspond to constructs on the left and the appropriate heavy chain and/or light chain categories along the top.

[0149] FIG. 79: Construct identifier to SEQ ID NO correspondence table. Constructs, paired heavy and light chain variants, combining light chain histidine and alanine scanning variants with heavy chain histidine and alanine scanning variants are listed in the first column of the table, SEQ ID NOs are listed and correspond to constructs on the left and the appropriate heavy chain and/or light chain categories along the top.

[0150] FIG. 80: Construct identifier to SEQ ID NO correspondence table. Constructs, VH-Fc and VH-Fc converted to IgG, are listed in the first column of the table, SEQ ID NOs are listed and correspond to constructs on the left and the appropriate heavy chain and/or light chain categories along the top.

[0151] FIG. 81: Construct identifier to SEQ ID NO correspondence table. Constructs, heavy chain combinations histidine scanning and alanine scanning variants, are listed in the first column of the table, SEQ ID NOs are listed and correspond to constructs on the left and the appropriate heavy chain and/or light chain categories along the top.

[0152] FIG. 82: SDS PAGE for ROVALPITUZUMAB histidine scanning and alanine scanning. Expi293 cell culture supernatants post-harvest were loaded on non-reduced SDS PAGE gels to confirm expression of ROVALPITUZUMAB histidine scanning and alanine scanning variants. Arrows show the corresponding size for an IgG on a non-reduced SDS PAGE gel. MYT1182, MYT1183, MYT1185, MYT1193, MYT1194, MYT1195, and MYT1196 are ROVALPITUZUMAB heavy chain combinations histidine scanning and alanine scanning variants.

[0153] FIGS. 83a to 83g: Binding of histidine scanning and alanine scanning variants of ROVALPITUZUMAB to DLL3 by biolayer interferometry. MYT1182, MYT1183, MYT1185, MYT1193, MYT1194, MYT1195, and MYT1196, heavy chain combination histidine scanning and alanine scanning variants, were captured on anti-human Fc biosensors and associated with DLL3 at low pH or high pH, as specified in the figures.

[0154] FIG. 84: Construct identifier to SEQ ID NO correspondence table. Constructs, starting ABPCs, are listed in the first column of the table, SEQ ID NOs are listed and correspond to constructs on the left and the appropriate CDR categories along the top.

### DETAILED DESCRIPTION

[0155] Provided herein are antigen-binding protein constructs (ABPCs) that include: a first antigen-binding domain that is capable of specifically binding DLL3 or an epitope of DLL3 presented on the surface of a target mammalian cell, where: (a) the dissociation rate of the first antigen-binding domain at a pH of about 4.0 to about 6.5 is faster than the dissociation rate at a pH of about 7.0 to about 8.0; and/or (b) the dissociation constant (K_{D}) of the first antigen-binding domain at a pH of about 4.0 to about 6.5 is greater than the K_{D} at a pH of about 7.0 to about 8.0. In some examples of these ABPCs, the ABPC is degraded in the target mammalian cell following internalization of the ABPC by the target mammalian cell. Some examples of any of the ABPCs described herein can further include a conjugated toxin, radioisotope, drug, or small molecule (e.g., a fluorophore or dye).

[0156] Also provided are antigen-binding protein constructs (ABPCs) that include: a first antigen-binding domain that is capable of specifically binding DLL3 or an epitope of DLL3 presented on the surface of a target mammalian cell; and a conjugated toxin, radioisotope, drug, or small molecule, where: (a) the dissociation rate of the first antigen-binding domain at a pH of about 4.0 to about 6.5 is faster than the dissociation rate at a pH of about 7.0 to about 8.0; and/or the dissociation constant (K_{D}) of the first antigen-binding domain at a pH of about 4.0 to about 6.5 is greater than the K_{D} at a pH of about 7.0 to about 8.0; and (b) a composition including the ABPC provides for one or more (e.g., two or three) of: an increase (e.g., a detectable increase) in toxin liberation in the target mammalian cell as compared to a composition comprising the same amount of a control ABPC; an increase (e.g., a detectable increase) in target mammalian cell killing as compared to a composition comprising the same amount of a control ABPC; and an increase (e.g., a detectable increase) in endolysosomal delivery in the target mammalian cell as compared to a composition comprising the same amount of a control ABPC.

[0157] In some examples of any of the ABPCs described herein, the first antigen-binding domain includes a heavy chain variable domain of rovalpituzumab with one or more (e.g., one, two, three, four, five, six, seven, eight, nine, ten, eleven, twelve, thirteen, fourteen, fifteen, sixteen, seventeen, eighteen, nineteen, or twenty) amino acids substituted with a histidine. In some examples of any of the ABPCs described herein, the first antigen-binding domain includes a light chain variable domain of rovalpituzumab with one or more (e.g., one, two, three, four, five, six, seven, eight, nine, ten, eleven, twelve, thirteen, fourteen, fifteen, sixteen, seventeen, eighteen, nineteen, or twenty) amino acids substituted with a histidine. In some examples of any of the ABPCs described herein, the first antigen-binding domain includes a heavy chain variable domain of rovalpituzumab with one or more (e.g., one, two, three, four, five, six, seven, eight, nine, ten, eleven, twelve, thirteen, fourteen, fifteen, sixteen, seventeen, eighteen, nineteen, or twenty) amino acids substituted with a histidine; and a light chain variable domain of rovalpituzumab with one or more (e.g., one, two, three, four, five, six, seven, eight, nine, ten, eleven, twelve, thirteen, fourteen, fifteen, sixteen, seventeen, eighteen, nineteen, or twenty) amino acids substituted with a histidine. In some examples of any of the ABPCs described herein, the heavy chain variable domain of rovalpituzumab comprises SEQ ID NO: 1. In some examples of any of the ABPCs described herein, the light chain variable domain of rovalpituzumab comprises SEQ ID NO: 2.

[0158] In some examples of any of the ABPCs described herein, the first antigen-binding domain comprises a heavy chain variable domain comprising a CDR1, a CDR2, and a CDR3 of SEQ ID NO: 3, SEQ ID NO: 4, and SEQ ID NO: 5, respectively, with collectively a total of one or more (e.g., one, two, three, four, five, six, seven, eight, nine, or ten) amino acid positions in SEQ ID NOs: 3-5 substituted with a histidine. In some examples of any of the ABPCs described herein, the first antigen-binding domain comprises a light chain variable domain comprising a CDR1, a CDR2, and a CDR3 of SEQ ID NO: 6, SEQ ID NO: 7, and SEQ ID NO: 8, respectively, with collectively a total of one or more (e.g., one, two, three, four, five, six, seven, eight, nine, or ten) amino acid positions in SEQ ID NOs: 6-8 substituted with a histidine. In some examples of any of the ABPCs described herein, the first antigen-binding domain includes: a heavy chain variable domain comprising a CDR1, a CDR2, and a CDR3 of SEQ ID NO: 3, SEQ ID NO: 4, and SEQ ID NO: 5, respectively, with collectively a total of one or more (e.g., one, two, three, four, five, six, seven, eight, nine, or ten) amino acid positions in SEQ ID NOs: 3-5 substituted with a histidine; and a light chain variable domain comprising a CDR1, a CDR2, and a CDR3 of SEQ ID NO: 6, SEQ ID NO: 7, and SEQ ID NO: 8, respectively, with collectively a total of one or more (e.g., one, two, three, four, five, six, seven, eight, nine, or ten) amino acid positions in SEQ ID NOs: 6-8 substituted with a histidine.

[0159] In some examples of any of the ABPCs described herein, the first antigen-binding domain includes a heavy chain variable domain that is at least 90% (e.g., at least 92%, at least 94%, at least 96%, at least 98%, at least 99%, or 100%) identical to SEQ ID NO: 1, where the heavy chain variable domain includes a histidine at one or more (e.g., one, two, three, four, five, six, seven, eight, nine, ten, eleven, twelve, thirteen, fourteen, fifteen, sixteen, seventeen, eighteen, nineteen, or twenty) amino acid positions in SEQ ID NO: 1 selected from the group consisting of: 27, 29, 31, 32, 34, 35, 50, 53, 54, 55, 58, 97, 98, 101, 103, 105, and 106. In some examples of any of the ABPCs described herein, the first antigen-binding domain includes a light chain variable domain that is at least 90% (e.g., at least 92%, at least 94%, at least 96%, at least 98%, at least 99%, or 100%) identical to SEQ ID NO: 2, where the light chain variable domain includes a histidine at one or more (e.g., one, two, three, four, five, six, seven, eight, nine, ten, eleven, twelve, thirteen, fourteen, fifteen, sixteen, seventeen, eighteen, nineteen, or twenty) amino acid positions in SEQ ID NO: 2 selected from the group consisting of: 25, 26, 29, 32, 33, 34, 51, 54, 89, 90, 93, 94, 95, and 96. In some examples of any of the ABPCs described herein the first antigen-binding domain includes: a heavy chain variable domain that is at least 90% (e.g., at least 92%, at least 94%, at least 96%, at least 98%, at least 99%, or 100%) identical to SEQ ID NO: 1, where the heavy chain variable domain includes a histidine at one or more (e.g., one, two, three, four, five, six, seven, eight, nine, ten, eleven, twelve, thirteen, fourteen, fifteen, sixteen, seventeen, eighteen, nineteen, or twenty) amino acid positions in SEQ ID NO: 1 selected from the group consisting of: 27, 29, 31, 32, 34, 35, 50, 53, 54, 55, 58, 97, 98, 101, 103, 105, and 106, and a light chain variable domain that is at least 90% (e.g., at least 92%, at least 94%, at least 96%, at least 98%, at least 99%, or 100%) identical to SEQ ID NO: 2, where the light chain variable domain includes a histidine at one or more (e.g., one, two, three, four, five, six, seven, eight, nine, ten, eleven, twelve, thirteen, fourteen, fifteen, sixteen, seventeen, eighteen, nineteen, or twenty) amino acid positions in SEQ ID NO: 2 selected from the group consisting of: 25, 26, 29, 32, 33, 34, 51, 54, 89, 90, 93, 94, 95, and 96.

[0160] In some examples of any of the ABPCs described herein, a heavy chain variable domain includes a heavy chain variable domain that is at least 90% (e.g., at least 92%, at least 94%, at least 96%, at least 98%, at least 99%, or 100%) identical to SEQ ID NO: 1, where the heavy chain variable domain includes a histidine at any of the specific combinations of one or more amino acid positions in SEQ ID NO: 1 listed in Table 1.

TABLE 1
Exemplary Combinations of Amino Acid Positions in
SEQ ID NO: 1 that can be Substituted with Histidine

29 + 27, 31 + 27, 32 + 27, 34 + 27, 35 + 27, 50 + 27, 53 + 27, 54 + 27, 55 + 27, 58 + 27, 97 +
27, 98 + 27, 101 + 27, 103 + 27, 105 + 27, 106 + 27, 31 + 29, 32 + 29, 34 + 29, 35 + 29, 50 +
29, 53 + 29, 54 + 29, 55 + 29, 58 + 29, 97 + 29, 98 + 29, 101 + 29, 103 + 29, 105 + 29, 106 +
29, 32 + 31, 34 + 31, 35 + 31, 50 + 31, 53 + 31, 54 + 31, 55 + 31, 58 + 31, 97 + 31, 98 + 31,
101 + 31, 103 + 31, 105 + 31, 106 + 31, 34 + 32, 35 + 32, 50 + 32, 53 + 32, 54 + 32, 55 + 32,
58 + 32, 97 + 32, 98 + 32, 101 + 32, 103 + 32, 105 + 32, 106 + 32, 35 + 34, 50 + 34, 53 + 34,
54 + 34, 55 + 34, 58 + 34, 97 + 34, 98 + 34, 101 + 34, 103 + 34, 105 + 34, 106 + 34, 50 + 35,
53 + 35, 54 + 35, 55 + 35, 58 + 35, 97 + 35, 98 + 35, 101 + 35, 103 + 35, 105 + 35, 106 + 35,
53 + 50, 54 + 50, 55 + 50, 58 + 50, 97 + 50, 98 + 50, 101 + 50, 103 + 50, 105 + 50, 106 + 50,
54 + 53, 55 + 53, 58 + 53, 97 + 53, 98 + 53, 101 + 53, 103 + 53, 105 + 53, 106 + 53, 55 + 54,
58 + 54, 97 + 54, 98 + 54, 101 + 54, 103 + 54, 105 + 54, 106 + 54, 58 + 55, 97 + 55, 98 + 55,
101 + 55, 103 + 55, 105 + 55, 106 + 55, 97 + 58, 98 + 58, 101 + 58, 103 + 58, 105 + 58, 106 +
58, 98 + 97, 101 + 97, 103 + 97, 105 + 97, 106 + 97, 101 + 98, 103 + 98, 105 + 98, 106 + 98,
103 + 101, 105 + 101, 106 + 101, 105 + 103, 106 + 103, 106 + 105, 27 + 31 + 29, 27 + 32 +
29, 27 + 34 + 29, 27 + 35 + 29, 27 + 50 + 29, 27 + 53 + 29, 27 + 54 + 29, 27 + 55 + 29, 27 +
58 + 29, 27 + 97 + 29, 27 + 98 + 29, 27 + 101 + 29, 27 + 103 + 29, 27 + 105 + 29, 27 + 106 +
29, 27 + 32 + 31, 27 + 34 + 31, 27 + 35 + 31, 27 + 50 + 31, 27 + 53 + 31, 27 + 54 + 31, 27 +
55 + 31, 27 + 58 + 31, 27 + 97 + 31, 27 + 98 + 31, 27 + 101 + 31, 27 + 103 + 31, 27 + 105 +
31, 27 + 106 + 31, 29 + 32 + 31, 29 + 34 + 31, 29 + 35 + 31, 29 + 50 + 31, 29 + 53 + 31, 29 +
54 + 31, 29 + 55 + 31, 29 + 58 + 31, 29 + 97 + 31, 29 + 98 + 31, 29 + 101 + 31, 29 + 103 +
31, 29 + 105 + 31, 29 + 106 + 31, 27 + 34 + 32, 27 + 35 + 32, 27 + 50 + 32, 27 + 53 + 32, 27 +
54 + 32, 27 + 55 + 32, 27 + 58 + 32, 27 + 97 + 32, 27 + 98 + 32, 27 + 101 + 32, 27 + 103 +
32, 27 + 105 + 32, 27 + 106 + 32, 29 + 34 + 32, 29 + 35 + 32, 29 + 50 + 32, 29 + 53 + 32, 29 +
54 + 32, 29 + 55 + 32, 29 + 58 + 32, 29 + 97 + 32, 29 + 98 + 32, 29 + 101 + 32, 29 + 103 +
32, 29 + 105 + 32, 29 + 106 + 32, 31 + 34 + 32, 31 + 35 + 32, 31 + 50 + 32, 31 + 53 + 32, 31 +
54 + 32, 31 + 55 + 32, 31 + 58 + 32, 31 + 97 + 32, 31 + 98 + 32, 31 + 101 + 32, 31 + 103 +
32, 31 + 105 + 32, 31 + 106 + 32, 27 + 35 + 34, 27 + 50 + 34, 27 + 53 + 34, 27 + 54 + 34, 27 +
55 + 34, 27 + 58 + 34, 27 + 97 + 34, 27 + 98 + 34, 27 + 101 + 34, 27 + 103 + 34, 27 + 105 +
34, 27 + 106 + 34, 29 + 35 + 34, 29 + 50 + 34, 29 + 53 + 34, 29 + 54 + 34, 29 + 55 + 34, 29 +
58 + 34, 29 + 97 + 34, 29 + 98 + 34, 29 + 101 + 34, 29 + 103 + 34, 29 + 105 + 34, 29 + 106 +
34, 31 + 35 + 34, 31 + 50 + 34, 31 + 53 + 34, 31 + 54 + 34, 31 + 55 + 34, 31 + 58 + 34, 31 +
97 + 34, 31 + 98 + 34, 31 + 101 + 34, 31 + 103 + 34, 31 + 105 + 34, 31 + 106 + 34, 32 + 35 +
34, 32 + 50 + 34, 32 + 53 + 34, 32 + 54 + 34, 32 + 55 + 34, 32 + 58 + 34, 32 + 97 + 34, 32 +
98 + 34, 32 + 101 + 34, 32 + 103 + 34, 32 + 105 + 34, 32 + 106 + 34, 27 + 50 + 35, 27 + 53 +
35, 27 + 54 + 35, 27 + 55 + 35, 27 + 58 + 35, 27 + 97 + 35, 27 + 98 + 35, 27 + 101 + 35, 27 +
103 + 35, 27 + 105 + 35, 27 + 106 + 35, 29 + 50 + 35, 29 + 53 + 35, 29 + 54 + 35, 29 + 55 +
35, 29 + 58 + 35, 29 + 97 + 35, 29 + 98 + 35, 29 + 101 + 35, 29 + 103 + 35, 29 + 105 + 35, 29 +
106 + 35, 31 + 50 + 35, 31 + 53 + 35, 31 + 54 + 35, 31 + 55 + 35, 31 + 58 + 35, 31 + 97 +
35, 31 + 98 + 35, 31 + 101 + 35, 31 + 103 + 35, 31 + 105 + 35, 31 + 106 + 35, 32 + 50 + 35,
32 + 53 + 35, 32 + 54 + 35, 32 + 55 + 35, 32 + 58 + 35, 32 + 97 + 35, 32 + 98 + 35, 32 + 101 +
35, 32 + 103 + 35, 32 + 105 + 35, 32 + 106 + 35, 34 + 50 + 35, 34 + 53 + 35, 34 + 54 + 35,
34 + 55 + 35, 34 + 58 + 35, 34 + 97 + 35, 34 + 98 + 35, 34 + 101 + 35, 34 + 103 + 35, 34 +
105 + 35, 34 + 106 + 35, 27 + 53 + 50, 27 + 54 + 50, 27 + 55 + 50, 27 + 58 + 50, 27 + 97 +
50, 27 + 98 + 50, 27 + 101 + 50, 27 + 103 + 50, 27 + 105 + 50, 27 + 106 + 50, 29 + 53 + 50,
29 + 54 + 50, 29 + 55 + 50, 29 + 58 + 50, 29 + 97 + 50, 29 + 98 + 50, 29 + 101 + 50, 29 + 103 +
50, 29 + 105 + 50, 29 + 106 + 50, 31 + 53 + 50, 31 + 54 + 50, 31 + 55 + 50, 31 + 58 + 50,
31 + 97 + 50, 31 + 98 + 50, 31 + 101 + 50, 31 + 103 + 50, 31 + 105 + 50, 31 + 106 + 50, 32 +
53 + 50, 32 + 54 + 50, 32 + 55 + 50, 32 + 58 + 50, 32 + 97 + 50, 32 + 98 + 50, 32 + 101 + 50,
32 + 103 + 50, 32 + 105 + 50, 32 + 106 + 50, 34 + 53 + 50, 34 + 54 + 50, 34 + 55 + 50, 34 +
58 + 50, 34 + 97 + 50, 34 + 98 + 50, 34 + 101 + 50, 34 + 103 + 50, 34 + 105 + 50, 34 + 106 +
50, 35 + 53 + 50, 35 + 54 + 50, 35 + 55 + 50, 35 + 58 + 50, 35 + 97 + 50, 35 + 98 + 50, 35 +
101 + 50, 35 + 103 + 50, 35 + 105 + 50, 35 + 106 + 50, 27 + 54 + 53, 27 + 55 + 53, 27 + 58 +
53, 27 + 97 + 53, 27 + 98 + 53, 27 + 101 + 53, 27 + 103 + 53, 27 + 105 + 53, 27 + 106 + 53,
29 + 54 + 53, 29 + 55 + 53, 29 + 58 + 53, 29 + 97 + 53, 29 + 98 + 53, 29 + 101 + 53, 29 + 103 +
53, 29 + 105 + 53, 29 + 106 + 53, 31 + 54 + 53, 31 + 55 + 53, 31 + 58 + 53, 31 + 97 + 53,
31 + 98 + 53, 31 + 101 + 53, 31 + 103 + 53, 31 + 105 + 53, 31 + 106 + 53, 32 + 54 + 53, 32 +
55 + 53, 32 + 58 + 53, 32 + 97 + 53, 32 + 98 + 53, 32 + 101 + 53, 32 + 103 + 53, 32 + 105 +
53, 32 + 106 + 53, 34 + 54 + 53, 34 + 55 + 53, 34 + 58 + 53, 34 + 97 + 53, 34 + 98 + 53, 34 +
101 + 53, 34 + 103 + 53, 34 + 105 + 53, 34 + 106 + 53, 35 + 54 + 53, 35 + 55 + 53, 35 + 58 +
53, 35 + 97 + 53, 35 + 98 + 53, 35 + 101 + 53, 35 + 103 + 53, 35 + 105 + 53, 35 + 106 + 53,
50 + 54 + 53, 50 + 55 + 53, 50 + 58 + 53, 50 + 97 + 53, 50 + 98 + 53, 50 + 101 + 53, 50 + 103 +
53, 50 + 105 + 53, 50 + 106 + 53, 27 + 55 + 54, 27 + 58 + 54, 27 + 97 + 54, 27 + 98 + 54,
27 + 101 + 54, 27 + 103 + 54, 27 + 105 + 54, 27 + 106 + 54, 29 + 55 + 54, 29 + 58 + 54, 29 +
97 + 54, 29 + 98 + 54, 29 + 101 + 54, 29 + 103 + 54, 29 + 105 + 54, 29 + 106 + 54, 31 + 55 +
54, 31 + 58 + 54, 31 + 97 + 54, 31 + 98 + 54, 31 + 101 + 54, 31 + 103 + 54, 31 + 105 + 54, 31 +
106 + 54, 32 + 55 + 54, 32 + 58 + 54, 32 + 97 + 54, 32 + 98 + 54, 32 + 101 + 54, 32 + 103 +
54, 32 + 105 + 54, 32 + 106 + 54, 34 + 55 + 54, 34 + 58 + 54, 34 + 97 + 54, 34 + 98 + 54, 34 +
101 + 54, 34 + 103 + 54, 34 + 105 + 54, 34 + 106 + 54, 35 + 55 + 54, 35 + 58 + 54, 35 + 97 +
54, 35 + 98 + 54, 35 + 101 + 54, 35 + 103 + 54, 35 + 105 + 54, 35 + 106 + 54, 50 + 55 + 54,
50 + 58 + 54, 50 + 97 + 54, 50 + 98 + 54, 50 + 101 + 54, 50 + 103 + 54, 50 + 105 + 54, 50 +
106 + 54, 53 + 55 + 54, 53 + 58 + 54, 53 + 97 + 54, 53 + 98 + 54, 53 + 101 + 54, 53 + 103 +
54, 53 + 105 + 54, 53 + 106 + 54, 27 + 58 + 55, 27 + 97 + 55, 27 + 98 + 55, 27 + 101 + 55, 27 +
103 + 55, 27 + 105 + 55, 27 + 106 + 55, 29 + 58 + 55, 29 + 97 + 55, 29 + 98 + 55, 29 + 101 +
55, 29 + 103 + 55, 29 + 105 + 55, 29 + 106 + 55, 31 + 58 + 55, 31 + 97 + 55, 31 + 98 + 55,
31 + 101 + 55, 31 + 103 + 55, 31 + 105 + 55, 31 + 106 + 55, 32 + 58 + 55, 32 + 97 + 55, 32 +
98 + 55, 32 + 101 + 55, 32 + 103 + 55, 32 + 105 + 55, 32 + 106 + 55, 34 + 58 + 55, 34 + 97 +
55, 34 + 98 + 55, 34 + 101 + 55, 34 + 103 + 55, 34 + 105 + 55, 34 + 106 + 55, 35 + 58 + 55,
35 + 97 + 55, 35 + 98 + 55, 35 + 101 + 55, 35 + 103 + 55, 35 + 105 + 55, 35 + 106 + 55, 50 +
58 + 55, 50 + 97 + 55, 50 + 98 + 55, 50 + 101 + 55, 50 + 103 + 55, 50 + 105 + 55, 50 + 106 +
55, 53 + 58 + 55, 53 + 97 + 55, 53 + 98 + 55, 53 + 101 + 55, 53 + 103 + 55, 53 + 105 + 55, 53 +
106 + 55, 54 + 58 + 55, 54 + 97 + 55, 54 + 98 + 55, 54 + 101 + 55, 54 + 103 + 55, 54 + 105 +
55, 54 + 106 + 55, 27 + 97 + 58, 27 + 98 + 58, 27 + 101 + 58, 27 + 103 + 58, 27 + 105 + 58,
27 + 106 + 58, 29 + 97 + 58, 29 + 98 + 58, 29 + 101 + 58, 29 + 103 + 58, 29 + 105 + 58, 29 +
106 + 58, 31 + 97 + 58, 31 + 98 + 58, 31 + 101 + 58, 31 + 103 + 58, 31 + 105 + 58, 31 + 106 +
58, 32 + 97 + 58, 32 + 98 + 58, 32 + 101 + 58, 32 + 103 + 58, 32 + 105 + 58, 32 + 106 + 58,
34 + 97 + 58, 34 + 98 + 58, 34 + 101 + 58, 34 + 103 + 58, 34 + 105 + 58, 34 + 106 + 58, 35 +
97 + 58, 35 + 98 + 58, 35 + 101 + 58, 35 + 103 + 58, 35 + 105 + 58, 35 + 106 + 58, 50 + 97 +
58, 50 + 98 + 58, 50 + 101 + 58, 50 + 103 + 58, 50 + 105 + 58, 50 + 106 + 58, 53 + 97 + 58,
53 + 98 + 58, 53 + 101 + 58, 53 + 103 + 58, 53 + 105 + 58, 53 + 106 + 58, 54 + 97 + 58, 54 +
98 + 58, 54 + 101 + 58, 54 + 103 + 58, 54 + 105 + 58, 54 + 106 + 58, 55 + 97 + 58, 55 + 98 +
58, 55 + 101 + 58, 55 + 103 + 58, 55 + 105 + 58, 55 + 106 + 58, 27 + 98 + 97, 27 + 101 + 97,
27 + 103 + 97, 27 + 105 + 97, 27 + 106 + 97, 29 + 98 + 97, 29 + 101 + 97, 29 + 103 + 97, 29 +
105 + 97, 29 + 106 + 97, 31 + 98 + 97, 31 + 101 + 97, 31 + 103 + 97, 31 + 105 + 97, 31 +
106 + 97, 32 + 98 + 97, 32 + 101 + 97, 32 + 103 + 97, 32 + 105 + 97, 32 + 106 + 97, 34 + 98 +
97, 34 + 101 + 97, 34 + 103 + 97, 34 + 105 + 97, 34 + 106 + 97, 35 + 98 + 97, 35 + 101 +
97, 35 + 103 + 97, 35 + 105 + 97, 35 + 106 + 97, 50 + 98 + 97, 50 + 101 + 97, 50 + 103 + 97,
50 + 105 + 97, 50 + 106 + 97, 53 + 98 + 97, 53 + 101 + 97, 53 + 103 + 97, 53 + 105 + 97, 53 +
106 + 97, 54 + 98 + 97, 54 + 101 + 97, 54 + 103 + 97, 54 + 105 + 97, 54 + 106 + 97, 55 +
98 + 97, 55 + 101 + 97, 55 + 103 + 97, 55 + 105 + 97, 55 + 106 + 97, 58 + 98 + 97, 58 + 101 +
97, 58 + 103 + 97, 58 + 105 + 97, 58 + 106 + 97, 27 + 101 + 98, 27 + 103 + 98, 27 + 105 +
98, 27 + 106 + 98, 29 + 101 + 98, 29 + 103 + 98, 29 + 105 + 98, 29 + 106 + 98, 31 + 101 + 98,
31 + 103 + 98, 31 + 105 + 98, 31 + 106 + 98, 32 + 101 + 98, 32 + 103 + 98, 32 + 105 + 98, 32 +
106 + 98, 34 + 101 + 98, 34 + 103 + 98, 34 + 105 + 98, 34 + 106 + 98, 35 + 101 + 98, 35 +
103 + 98, 35 + 105 + 98, 35 + 106 + 98, 50 + 101 + 98, 50 + 103 + 98, 50 + 105 + 98, 50 +
106 + 98, 53 + 101 + 98, 53 + 103 + 98, 53 + 105 + 98, 53 + 106 + 98, 54 + 101 + 98, 54 +
103 + 98, 54 + 105 + 98, 54 + 106 + 98, 55 + 101 + 98, 55 + 103 + 98, 55 + 105 + 98, 55 +
106 + 98, 58 + 101 + 98, 58 + 103 + 98, 58 + 105 + 98, 58 + 106 + 98, 97 + 101 + 98, 97 +
103 + 98, 97 + 105 + 98, 97 + 106 + 98, 27 + 103 + 101, 27 + 105 + 101, 27 + 106 + 101, 29 +
103 + 101, 29 + 105 + 101, 29 + 106 + 101, 31 + 103 + 101, 31 + 105 + 101, 31 + 106 + 101,
32 + 103 + 101, 32 + 105 + 101, 32 + 106 + 101, 34 + 103 + 101, 34 + 105 + 101, 34 + 106 +
101, 35 + 103 + 101, 35 + 105 + 101, 35 + 106 + 101, 50 + 103 + 101, 50 + 105 + 101, 50 +
106 + 101, 53 + 103 + 101, 53 + 105 + 101, 53 + 106 + 101, 54 + 103 + 101, 54 + 105 + 101,
54 + 106 + 101, 55 + 103 + 101, 55 + 105 + 101, 55 + 106 + 101, 58 + 103 + 101, 58 + 105 +
101, 58 + 106 + 101, 97 + 103 + 101, 97 + 105 + 101, 97 + 106 + 101, 98 + 103 + 101, 98 +
105 + 101, 98 + 106 + 101, 27 + 105 + 103, 27 + 106 + 103, 29 + 105 + 103, 29 + 106 + 103,
31 + 105 + 103, 31 + 106 + 103, 32 + 105 + 103, 32 + 106 + 103, 34 + 105 + 103, 34 + 106 +
103, 35 + 105 + 103, 35 + 106 + 103, 50 + 105 + 103, 50 + 106 + 103, 53 + 105 + 103, 53 +
106 + 103, 54 + 105 + 103, 54 + 106 + 103, 55 + 105 + 103, 55 + 106 + 103, 58 + 105 + 103,
58 + 106 + 103, 97 + 105 + 103, 97 + 106 + 103, 98 + 105 + 103, 98 + 106 + 103, 101 + 105 +
103, 101 + 106 + 103, 27 + 106 + 105, 29 + 106 + 105, 31 + 106 + 105, 32 + 106 + 105, 34 +
106 + 105, 35 + 106 + 105, 50 + 106 + 105, 53 + 106 + 105, 54 + 106 + 105, 55 + 106 + 105,
58 + 106 + 105, 97 + 106 + 105, 98 + 106 + 105, 101 + 106 + 105, 103 + 106 + 105

[0161] In some examples of any of the ABPCs described herein, a light chain variable domain includes a light chain variable domain that is at least 90% (e.g., at least 92%, at least 94%, at least 96%, at least 98%, at least 99%, or 100%) identical to SEQ ID NO: 2, where the light chain variable domain includes a histidine at any of the specific combinations of one or more amino acid positions in SEQ ID NO: 2 listed in Table 2.

TABLE 2
Exemplary Combinations of Amino Acid Positions in
SEQ ID NO: 2 that can be Substituted with Histidine

25 + 26, 25 + 29, 25 + 32, 25 + 33, 25 + 34, 25 + 51, 25 + 54, 25 + 89, 25 + 90, 25 + 93, 25 +
94, 25 + 95, 25 + 96, 26 + 29, 26 + 32, 26 + 33, 26 + 34, 26 + 51, 26 + 54, 26 + 89, 26 + 90,
26 + 93, 26 + 94, 26 + 95, 26 + 96, 29 + 32, 29 + 33, 29 + 34, 29 + 51, 29 + 54, 29 + 89, 29 +
90, 29 + 93, 29 + 94, 29 + 95, 29 + 96, 32 + 33, 32 + 34, 32 + 51, 32 + 54, 32 + 89, 32 + 90,
32 + 93, 32 + 94, 32 + 95, 32 + 96, 33 + 34, 33 + 51, 33 + 54, 33 + 89, 33 + 90, 33 + 93, 33 +
94, 33 + 95, 33 + 96, 34 + 51, 34 + 54, 34 + 89, 34 + 90, 34 + 93, 34 + 94, 34 + 95, 34 + 96,
51 + 54, 51 + 89, 51 + 90, 51 + 93, 51 + 94, 51 + 95, 51 + 96, 54 + 89, 54 + 90, 54 + 93, 54 +
94, 54 + 95, 54 + 96, 89 + 90, 89 + 93, 89 + 94, 89 + 95, 89 + 96, 90 + 93, 90 + 94, 90 + 95,
90 + 96, 93 + 94, 93 + 95, 93 + 96, 94 + 95, 94 + 96, 95 + 96, 25 + 26 + 29, 25 + 26 + 32, 25 +
26 + 33, 25 + 26 + 34, 25 + 26 + 51, 25 + 26 + 54, 25 + 26 + 89, 25 + 26 + 90, 25 + 26 + 93,
25 + 26 + 94, 25 + 26 + 95, 25 + 26 + 96, 25 + 29 + 32, 25 + 29 + 33, 25 + 29 + 34, 25 + 29 +
51, 25 + 29 + 54, 25 + 29 + 89, 25 + 29 + 90, 25 + 29 + 93, 25 + 29 + 94, 25 + 29 + 95, 25 +
29 + 96, 26 + 29 + 32, 26 + 29 + 33, 26 + 29 + 34, 26 + 29 + 51, 26 + 29 + 54, 26 + 29 + 89,
26 + 29 + 90, 26 + 29 + 93, 26 + 29 + 94, 26 + 29 + 95, 26 + 29 + 96, 25 + 32 + 33, 25 + 32 +
34, 25 + 32 + 51, 25 + 32 + 54, 25 + 32 + 89, 25 + 32 + 90, 25 + 32 + 93, 25 + 32 + 94, 25 +
32 + 95, 25 + 32 + 96, 26 + 32 + 33, 26 + 32 + 34, 26 + 32 + 51, 26 + 32 + 54, 26 + 32 + 89,
26 + 32 + 90, 26 + 32 + 93, 26 + 32 + 94, 26 + 32 + 95, 26 + 32 + 96, 29 + 32 + 33, 29 + 32 +
34, 29 + 32 + 51, 29 + 32 + 54, 29 + 32 + 89, 29 + 32 + 90, 29 + 32 + 93, 29 + 32 + 94, 29 +
32 + 95, 29 + 32 + 96, 25 + 33 + 34, 25 + 33 + 51, 25 + 33 + 54, 25 + 33 + 89, 25 + 33 + 90,
25 + 33 + 93, 25 + 33 + 94, 25 + 33 + 95, 25 + 33 + 96, 26 + 33 + 34, 26 + 33 + 51, 26 + 33 +
54, 26 + 33 + 89, 26 + 33 + 90, 26 + 33 + 93, 26 + 33 + 94, 26 + 33 + 95, 26 + 33 + 96, 29 +
33 + 34, 29 + 33 + 51, 29 + 33 + 54, 29 + 33 + 89, 29 + 33 + 90, 29 + 33 + 93, 29 + 33 + 94,
29 + 33 + 95, 29 + 33 + 96, 32 + 33 + 34, 32 + 33 + 51, 32 + 33 + 54, 32 + 33 + 89, 32 + 33 +
90, 32 + 33 + 93, 32 + 33 + 94, 32 + 33 + 95, 32 + 33 + 96, 25 + 34 + 51, 25 + 34 + 54, 25 +
34 + 89, 25 + 34 + 90, 25 + 34 + 93, 25 + 34 + 94, 25 + 34 + 95, 25 + 34 + 96, 26 + 34 + 51,
26 + 34 + 54, 26 + 34 + 89, 26 + 34 + 90, 26 + 34 + 93, 26 + 34 + 94, 26 + 34 + 95, 26 + 34 +
96, 29 + 34 + 51, 29 + 34 + 54, 29 + 34 + 89, 29 + 34 + 90, 29 + 34 + 93, 29 + 34 + 94, 29 +
34 + 95, 29 + 34 + 96, 32 + 34 + 51, 32 + 34 + 54, 32 + 34 + 89, 32 + 34 + 90, 32 + 34 + 93,
32 + 34 + 94, 32 + 34 + 95, 32 + 34 + 96, 33 + 34 + 51, 33 + 34 + 54, 33 + 34 + 89, 33 + 34 +
90, 33 + 34 + 93, 33 + 34 + 94, 33 + 34 + 95, 33 + 34 + 96, 25 + 51 + 54, 25 + 51 + 89, 25 +
51 + 90, 25 + 51 + 93, 25 + 51 + 94, 25 + 51 + 95, 25 + 51 + 96, 26 + 51 + 54, 26 + 51 + 89,
26 + 51 + 90, 26 + 51 + 93, 26 + 51 + 94, 26 + 51 + 95, 26 + 51 + 96, 29 + 51 + 54, 29 + 51 +
89, 29 + 51 + 90, 29 + 51 + 93, 29 + 51 + 94, 29 + 51 + 95, 29 + 51 + 96, 32 + 51 + 54, 32 +
51 + 89, 32 + 51 + 90, 32 + 51 + 93, 32 + 51 + 94, 32 + 51 + 95, 32 + 51 + 96, 33 + 51 + 54,
33 + 51 + 89, 33 + 51 + 90, 33 + 51 + 93, 33 + 51 + 94, 33 + 51 + 95, 33 + 51 + 96, 34 + 51 +
54, 34 + 51 + 89, 34 + 51 + 90, 34 + 51 + 93, 34 + 51 + 94, 34 + 51 + 95, 34 + 51 + 96, 25 +
54 + 89, 25 + 54 + 90, 25 + 54 + 93, 25 + 54 + 94, 25 + 54 + 95, 25 + 54 + 96, 26 + 54 + 89,
26 + 54 + 90, 26 + 54 + 93, 26 + 54 + 94, 26 + 54 + 95, 26 + 54 + 96, 29 + 54 + 89, 29 + 54 +
90, 29 + 54 + 93, 29 + 54 + 94, 29 + 54 + 95, 29 + 54 + 96, 32 + 54 + 89, 32 + 54 + 90, 32 +
54 + 93, 32 + 54 + 94, 32 + 54 + 95, 32 + 54 + 96, 33 + 54 + 89, 33 + 54 + 90, 33 + 54 + 93,
33 + 54 + 94, 33 + 54 + 95, 33 + 54 + 96, 34 + 54 + 89, 34 + 54 + 90, 34 + 54 + 93, 34 + 54 +
94, 34 + 54 + 95, 34 + 54 + 96, 51 + 54 + 89, 51 + 54 + 90, 51 + 54 + 93, 51 + 54 + 94, 51 +
54 + 95, 51 + 54 + 96, 25 + 89 + 90, 25 + 89 + 93, 25 + 89 + 94, 25 + 89 + 95, 25 + 89 + 96,
26 + 89 + 90, 26 + 89 + 93, 26 + 89 + 94, 26 + 89 + 95, 26 + 89 + 96, 29 + 89 + 90, 29 + 89 +
93, 29 + 89 + 94, 29 + 89 + 95, 29 + 89 + 96, 32 + 89 + 90, 32 + 89 + 93, 32 + 89 + 94, 32 +
89 + 95, 32 + 89 + 96, 33 + 89 + 90, 33 + 89 + 93, 33 + 89 + 94, 33 + 89 + 95, 33 + 89 + 96,
34 + 89 + 90, 34 + 89 + 93, 34 + 89 + 94, 34 + 89 + 95, 34 + 89 + 96, 51 + 89 + 90, 51 + 89 +
93, 51 + 89 + 94, 51 + 89 + 95, 51 + 89 + 96, 54 + 89 + 90, 54 + 89 + 93, 54 + 89 + 94, 54 +
89 + 95, 54 + 89 + 96, 25 + 90 + 93, 25 + 90 + 94, 25 + 90 + 95, 25 + 90 + 96, 26 + 90 + 93,
26 + 90 + 94, 26 + 90 + 95, 26 + 90 + 96, 29 + 90 + 93, 29 + 90 + 94, 29 + 90 + 95, 29 + 90 +
96, 32 + 90 + 93, 32 + 90 + 94, 32 + 90 + 95, 32 + 90 + 96, 33 + 90 + 93, 33 + 90 + 94, 33 +
90 + 95, 33 + 90 + 96, 34 + 90 + 93, 34 + 90 + 94, 34 + 90 + 95, 34 + 90 + 96, 51 + 90 + 93,
51 + 90 + 94, 51 + 90 + 95, 51 + 90 + 96, 54 + 90 + 93, 54 + 90 + 94, 54 + 90 + 95, 54 + 90 +
96, 89 + 90 + 93, 89 + 90 + 94, 89 + 90 + 95, 89 + 90 + 96, 25 + 93 + 94, 25 + 93 + 95, 25 +
93 + 96, 26 + 93 + 94, 26 + 93 + 95, 26 + 93 + 96, 29 + 93 + 94, 29 + 93 + 95, 29 + 93 + 96,
32 + 93 + 94, 32 + 93 + 95, 32 + 93 + 96, 33 + 93 + 94, 33 + 93 + 95, 33 + 93 + 96, 34 + 93 +
94, 34 + 93 + 95, 34 + 93 + 96, 51 + 93 + 94, 51 + 93 + 95, 51 + 93 + 96, 54 + 93 + 94, 54 +
93 + 95, 54 + 93 + 96, 89 + 93 + 94, 89 + 93 + 95, 89 + 93 + 96, 90 + 93 + 94, 90 + 93 + 95,
90 + 93 + 96, 25 + 94 + 95, 25 + 94 + 96, 26 + 94 + 95, 26 + 94 + 96, 29 + 94 + 95, 29 + 94 +
96, 32 + 94 + 95, 32 + 94 + 96, 33 + 94 + 95, 33 + 94 + 96, 34 + 94 + 95, 34 + 94 + 96, 51 +
94 + 95, 51 + 94 + 96, 54 + 94 + 95, 54 + 94 + 96, 89 + 94 + 95, 89 + 94 + 96, 90 + 94 + 95,
90 + 94 + 96, 93 + 94 + 95, 93 + 94 + 96, 25 + 95 + 96, 26 + 95 + 96, 29 + 95 + 96, 32 + 95 +
96, 33 + 95 + 96, 34 + 95 + 96, 51 + 95 + 96, 54 + 95 + 96, 89 + 95 + 96, 90 + 95 + 96, 93 +
95 + 96, 94 + 95 + 96

[0162] In some examples of any of the ABPCs described herein, the first antigen-binding domain includes a heavy chain variable domain that is at least 90% (e.g., at least 92%, at least 94%, at least 96%, at least 98%, at least 99%, or 100%) identical to SEQ ID NO: 1, where the heavy chain variable domain includes a histidine at any of the specific combinations of one or more amino acid positions in SEQ ID NO: 1 listed in Table 1; and a light chain variable domain that that is at least 90% (e.g., at least 92%, at least 94%, at least 96%, at least 98%, at least 99%, or 100%) identical to SEQ ID NO: 2, where the light chain variable domain includes a histidine at any of the specific combinations of one or more amino acid positions in SEQ ID NO: 2 listed in Table 2.

[0163] In some examples of any of the ABPCs described herein, the first antigen-binding domain comprises a light chain variable domain that is at least 90% identical to SEQ ID NO: 2, wherein the light chain variable domain includes a histidine at position 25 in SEQ ID NO: 2; and a heavy chain variable domain that is at least 90% (e.g., at least 92%, at least 94%, at least 96%, at least 98%, at least 99%, or 100%) identical to SEQ ID NO: 1, where the heavy chain variable domain includes a histidine at any of the specific combinations of one or more amino acid positions in SEQ ID NO: 1 listed in Table 1.

[0164] In some examples of any of the ABPCs described herein, the first antigen-binding domain comprises a light chain variable domain comprising SEQ ID NO: 2, and a heavy chain variable domain that is at least 90% identical (e.g., at least 92%, at least 94%, at least 96%, at least 98%, at least 99%, or 100%) identical to SEQ ID NO: 1, where the heavy chain variable domain includes a histidine at any of the specific combinations of one or more (e.g., two, three, four, five, six, seven, eight, nine, or ten) amino acid positions in SEQ ID NO: 1 listed in Table 1.

[0165] In some examples of any of the ABPCs described herein, the first antigen-binding domain comprises a light chain variable domain that is at least 90% identical to SEQ ID NO: 2, wherein the light chain variable domain includes a histidine at position 26 in SEQ ID NO: 2; and a heavy chain variable domain that is at least 90% (e.g., at least 92%, at least 94%, at least 96%, at least 98%, at least 99%, or 100%) identical to SEQ ID NO: 1, where the heavy chain variable domain includes a histidine at any of the specific combinations of one or more amino acid positions in SEQ ID NO: 1 listed in Table 1.

[0166] In some examples of any of the ABPCs described herein, the first antigen-binding domain comprises a light chain variable domain that is at least 90% identical to SEQ ID NO: 2, wherein the light chain variable domain includes a histidine at position 29 in SEQ ID NO: 2; and a heavy chain variable domain that is at least 90% (e.g., at least 92%, at least 94%, at least 96%, at least 98%, at least 99%, or 100%) identical to SEQ ID NO: 1, where the heavy chain variable domain includes a histidine at any of the specific combinations of one or more amino acid positions in SEQ ID NO: 1 listed in Table 1.

[0167] In some examples of any of the ABPCs described herein, the first antigen-binding domain comprises a light chain variable domain that is at least 90% identical to SEQ ID NO: 2, wherein the light chain variable domain includes a histidine at position 32 in SEQ ID NO: 2; and a heavy chain variable domain that is at least 90% (e.g., at least 92%, at least 94%, at least 96%, at least 98%, at least 99%, or 100%) identical to SEQ ID NO: 1, where the heavy chain variable domain includes a histidine at any of the specific combinations of one or more amino acid positions in SEQ ID NO: 1 listed in Table 1.

[0168] In some examples of any of the ABPCs described herein, the first antigen-binding domain comprises a light chain variable domain that is at least 90% identical to SEQ ID NO: 2, wherein the light chain variable domain includes a histidine at position 33 in SEQ ID NO: 2; and a heavy chain variable domain that is at least 90% (e.g., at least 92%, at least 94%, at least 96%, at least 98%, at least 99%, or 100%) identical to SEQ ID NO: 1, where the heavy chain variable domain includes a histidine at any of the specific combinations of one or more amino acid positions in SEQ ID NO: 1 listed in Table 1.

[0169] In some examples of any of the ABPCs described herein, the first antigen-binding domain comprises a light chain variable domain that is at least 90% identical to SEQ ID NO: 2, wherein the light chain variable domain includes a histidine at position 34 in SEQ ID NO: 2; and a heavy chain variable domain that is at least 90% (e.g., at least 92%, at least 94%, at least 96%, at least 98%, at least 99%, or 100%) identical to SEQ ID NO: 1, where the heavy chain variable domain includes a histidine at any of the specific combinations of one or more amino acid positions in SEQ ID NO: 1 listed in Table 1.

[0170] In some examples of any of the ABPCs described herein, the first antigen-binding domain comprises a light chain variable domain that is at least 90% identical to SEQ ID NO: 2, wherein the light chain variable domain includes a histidine at position 51 in SEQ ID NO: 2; and a heavy chain variable domain that is at least 90% (e.g., at least 92%, at least 94%, at least 96%, at least 98%, at least 99%, or 100%) identical to SEQ ID NO: 1, where the heavy chain variable domain includes a histidine at any of the specific combinations of one or more amino acid positions in SEQ ID NO: 1 listed in Table 1.

[0171] In some examples of any of the ABPCs described herein, the first antigen-binding domain comprises a light chain variable domain that is at least 90% identical to SEQ ID NO: 2, wherein the light chain variable domain includes a histidine at position 54 in SEQ ID NO: 2; and a heavy chain variable domain that is at least 90% (e.g., at least 92%, at least 94%, at least 96%, at least 98%, at least 99%, or 100%) identical to SEQ ID NO: 1, where the heavy chain variable domain includes a histidine at any of the specific combinations of one or more amino acid positions in SEQ ID NO: 1 listed in Table 1.

[0172] In some examples of any of the ABPCs described herein, the first antigen-binding domain comprises a light chain variable domain that is at least 90% identical to SEQ ID NO: 2, wherein the light chain variable domain includes a histidine at position 89 in SEQ ID NO: 2; and a heavy chain variable domain that is at least 90% (e.g., at least 92%, at least 94%, at least 96%, at least 98%, at least 99%, or 100%) identical to SEQ ID NO: 1, where the heavy chain variable domain includes a histidine at any of the specific combinations of one or more amino acid positions in SEQ ID NO: 1 listed in Table 1.

[0173] In some examples of any of the ABPCs described herein, the first antigen-binding domain comprises a light chain variable domain that is at least 90% identical to SEQ ID NO: 2, wherein the light chain variable domain includes a histidine at position 90 in SEQ ID NO: 2; and a heavy chain variable domain that is at least 90% (e.g., at least 92%, at least 94%, at least 96%, at least 98%, at least 99%, or 100%) identical to SEQ ID NO: 1, where the heavy chain variable domain includes a histidine at any of the specific combinations of one or more amino acid positions in SEQ ID NO: 1 listed in Table 1.

[0174] In some examples of any of the ABPCs described herein, the first antigen-binding domain comprises a light chain variable domain that is at least 90% identical to SEQ ID NO: 2, wherein the light chain variable domain includes a histidine at position 93 in SEQ ID NO: 2; and a heavy chain variable domain that is at least 90% (e.g., at least 92%, at least 94%, at least 96%, at least 98%, at least 99%, or 100%) identical to SEQ ID NO: 1, where the heavy chain variable domain includes a histidine at any of the specific combinations of one or more amino acid positions in SEQ ID NO: 1 listed in Table 1.

[0175] In some examples of any of the ABPCs described herein, the first antigen-binding domain comprises a light chain variable domain that is at least 90% identical to SEQ ID NO: 2, wherein the light chain variable domain includes a histidine at position 94 in SEQ ID NO: 2; and a heavy chain variable domain that is at least 90% (e.g., at least 92%, at least 94%, at least 96%, at least 98%, at least 99%, or 100%) identical to SEQ ID NO: 1, where the heavy chain variable domain includes a histidine at any of the specific combinations of one or more amino acid positions in SEQ ID NO: 1 listed in Table 1.

[0176] In some examples of any of the ABPCs described herein, the first antigen-binding domain comprises a light chain variable domain that is at least 90% identical to SEQ ID NO: 2, wherein the light chain variable domain includes a histidine at position 95 in SEQ ID NO: 2; and a heavy chain variable domain that is at least 90% (e.g., at least 92%, at least 94%, at least 96%, at least 98%, at least 99%, or 100%) identical to SEQ ID NO: 1, where the heavy chain variable domain includes a histidine at any of the specific combinations of one or more amino acid positions in SEQ ID NO: 1 listed in Table 1.

[0177] In some examples of any of the ABPCs described herein, the first antigen-binding domain comprises a light chain variable domain that is at least 90% identical to SEQ ID NO: 2, wherein the light chain variable domain includes a histidine at position 96 in SEQ ID NO: 2; and a heavy chain variable domain that is at least 90% (e.g., at least 92%, at least 94%, at least 96%, at least 98%, at least 99%, or 100%) identical to SEQ ID NO: 1, where the heavy chain variable domain includes a histidine at any of the specific combinations of one or more amino acid positions in SEQ ID NO: 1 listed in Table 1.

[0178] In some examples of any of the ABPCs described herein, the first antigen-binding domain includes a heavy chain variable domain of rovalpituzumab with one or more (e.g., one, two, three, four, five, six, seven, eight, nine, ten, eleven, twelve, thirteen, fourteen, fifteen, sixteen, seventeen, eighteen, nineteen, or twenty) histidine(s) substituted with an alanine. In some examples of any of the ABPCs described herein, the first antigen-binding domain includes a light chain variable domain of rovalpituzumab with one or more (e.g., one, two, three, four, five, six, seven, eight, nine, ten, eleven, twelve, thirteen, fourteen, fifteen, sixteen, seventeen, eighteen, nineteen, or twenty) histidine(s) substituted with an alanine. In some examples of any of the ABPCs described herein, the first antigen-binding domain includes a heavy chain variable domain of rovalpituzumab with one or more (e.g., one, two, three, four, five, six, seven, eight, nine, ten, eleven, twelve, thirteen, fourteen, fifteen, sixteen, seventeen, eighteen, nineteen, or twenty) histidines substituted with an alanine; and a light chain variable domain of rovalpituzumab with one or more (e.g., one, two, three, four, five, six, seven, eight, nine, ten, eleven, twelve, thirteen, fourteen, fifteen, sixteen, seventeen, eighteen, nineteen, or twenty) histidine(s) substituted with an alanine. In some examples of any of the ABPCs described herein, the heavy chain variable domain of rovalpituzumab comprises SEQ ID NO: 1. In some examples of any of the ABPCs described herein, the light chain variable domain of rovalpituzumab comprises SEQ ID NO: 2.

[0179] In some examples of any of the ABPCs described herein, the first antigen-binding domain comprises a heavy chain variable domain comprising a CDR1, a CDR2, and a CDR3 of SEQ ID NO: 3, SEQ ID NO: 4, and SEQ ID NO: 5, respectively, with collectively a total of one or more (e.g., one, two, three, four, five, six, seven, eight, nine, or ten) histidine(s) in SEQ ID NOs: 3-5 substituted with an alanine. In some examples of any of the ABPCs described herein, the first antigen-binding domain comprises a light chain variable domain comprising a CDR1, a CDR2, and a CDR3 of SEQ ID NO: 6, SEQ ID NO: 7, and SEQ ID NO: 8, respectively, with collectively a total of one or more (e.g., one, two, three, four, five, six, seven, eight, nine, or ten) histidine(s) in SEQ ID NOs: 6-8 substituted with an alanine. In some examples of any of the ABPCs described herein, the first antigen-binding domain includes: a heavy chain variable domain comprising a CDR1, a CDR2, and a CDR3 of SEQ ID NO: 3, SEQ ID NO: 4, and SEQ ID NO: 5, respectively, with collectively a total of one or more (e.g., one, two, three, four, five, six, seven, eight, nine, or ten) histidine(s) in SEQ ID NOs: 3-5 substituted with an alanine; and a light chain variable domain comprising a CDR1, a CDR2, and a CDR3 of SEQ ID NO: 6, SEQ ID NO: 7, and SEQ ID NO: 8, respectively, with collectively a total of one or more (e.g., one, two, three, four, five, six, seven, eight, nine, or ten) histidine(s) in SEQ ID NOs: 6-8 substituted with an alanine.

[0180] In some examples of any of the ABPCs described herein, the first antigen-binding domain comprises a heavy chain variable domain of SEQ ID NO: 1, SEQ ID NO: 13, SEQ ID NO: 14, SEQ ID NO: 15, SEQ ID NO: 16, SEQ ID NO: 17, SEQ ID NO: 18, SEQ ID NO: 19, SEQ ID NO: 20, SEQ ID NO: 21, SEQ ID NO: 22, SEQ ID NO: 23, SEQ ID NO: 24, SEQ ID NO: 25, SEQ ID NO: 26, SEQ ID NO: 27, SEQ ID NO: 28, SEQ ID NO: 29, SEQ ID NO: 30, SEQ ID NO: 31, SEQ ID NO: 32, SEQ ID NO: 33, SEQ ID NO: 34, SEQ ID NO: 35, SEQ ID NO: 36, SEQ ID NO: 37, SEQ ID NO: 38, SEQ ID NO: 39, SEQ ID NO: 40, SEQ ID NO: 41, SEQ ID NO: 42, SEQ ID NO: 43, SEQ ID NO: 44, SEQ ID NO: 45, SEQ ID NO: 46, SEQ ID NO: 47, SEQ ID NO: 48, SEQ ID NO: 49, SEQ ID NO: 50, SEQ ID NO: 51, SEQ ID NO: 52, or SEQ ID NO: 53.

[0181] In some examples of any of the ABPCs described herein, the first antigen-binding domain includes a light chain variable domain of SEQ ID NO: 2, SEQ ID NO: 54, SEQ ID NO: 55, SEQ ID NO: 56, SEQ ID NO: 57, SEQ ID NO: 58, SEQ ID NO: 59, SEQ ID NO: 60, SEQ ID NO: 61, SEQ ID NO: 62, SEQ ID NO: 63, SEQ ID NO: 64, SEQ ID NO: 65, SEQ ID NO: 66, SEQ ID NO: 67, SEQ ID NO: 68, SEQ ID NO: 69, SEQ ID NO: 70, SEQ ID NO: 71, SEQ ID NO: 72, SEQ ID NO: 73, SEQ ID NO: 74, SEQ ID NO: 75, SEQ ID NO: 76, SEQ ID NO: 77, SEQ ID NO: 78, SEQ ID NO: 79, or SEQ ID NO: 80.

[0182] In some examples of any of the ABPCs described herein, the first antigen-binding domain includes a light chain variable domain comprising SEQ ID NO: 2, and a heavy chain variable domain comprising SEQ ID NO: 13, SEQ ID NO: 14, SEQ ID NO: 15, SEQ ID NO: 16, SEQ ID NO: 17, SEQ ID NO: 18, SEQ ID NO: 19, SEQ ID NO: 20, SEQ ID NO: 21, SEQ ID NO: 22, SEQ ID NO: 23, SEQ ID NO: 24, SEQ ID NO: 25, SEQ ID NO: 26, SEQ ID NO: 27, SEQ ID NO: 28, SEQ ID NO: 29, SEQ ID NO: 30, SEQ ID NO: 31, SEQ ID NO: 32, SEQ ID NO: 33, SEQ ID NO: 34, SEQ ID NO: 35, SEQ ID NO: 36, SEQ ID NO: 37, SEQ ID NO: 38, SEQ ID NO: 39, SEQ ID NO: 40, SEQ ID NO: 41, SEQ ID NO: 42, SEQ ID NO: 43, SEQ ID NO: 44, SEQ ID NO: 45, SEQ ID NO: 46, SEQ ID NO: 47, SEQ ID NO: 48, SEQ ID NO: 49, SEQ ID NO: 50, SEQ ID NO: 51, SEQ ID NO: 52, or SEQ ID NO: 53.

[0183] In some examples of any of the ABPCs described herein, the first antigen-binding domain includes a light chain variable domain comprising SEQ ID NO: 54, and a heavy chain variable domain comprising SEQ ID NO: 1, SEQ ID NO: 13, SEQ ID NO: 14, SEQ ID NO: 15, SEQ ID NO: 16, SEQ ID NO: 17, SEQ ID NO: 18, SEQ ID NO: 19, SEQ ID NO: 20, SEQ ID NO: 21, SEQ ID NO: 22, SEQ ID NO: 23, SEQ ID NO: 24, SEQ ID NO: 25, SEQ ID NO: 26, SEQ ID NO: 27, SEQ ID NO: 28, SEQ ID NO: 29, SEQ ID NO: 30, SEQ ID NO: 31, SEQ ID NO: 32, SEQ ID NO: 33, SEQ ID NO: 34, SEQ ID NO: 35, SEQ ID NO: 36, SEQ ID NO: 37, SEQ ID NO: 38, SEQ ID NO: 39, SEQ ID NO: 40, SEQ ID NO: 41, SEQ ID NO: 42, SEQ ID NO: 43, SEQ ID NO: 44, SEQ ID NO: 45, SEQ ID NO: 46, SEQ ID NO: 47, SEQ ID NO: 48, SEQ ID NO: 49, SEQ ID NO: 50, SEQ ID NO: 51, SEQ ID NO: 52, or SEQ ID NO: 53.

[0184] In some examples of any of the ABPCs described herein, the first antigen-binding domain includes a light chain variable domain comprising SEQ ID NO: 55, and a heavy chain variable domain comprising SEQ ID NO: 1, SEQ ID NO: 13, SEQ ID NO: 14, SEQ ID NO: 15, SEQ ID NO: 16, SEQ ID NO: 17, SEQ ID NO: 18, SEQ ID NO: 19, SEQ ID NO: 20, SEQ ID NO: 21, SEQ ID NO: 22, SEQ ID NO: 23, SEQ ID NO: 24, SEQ ID NO: 25, SEQ ID NO: 26, SEQ ID NO: 27, SEQ ID NO: 28, SEQ ID NO: 29, SEQ ID NO: 30, SEQ ID NO: 31, SEQ ID NO: 32, SEQ ID NO: 33, SEQ ID NO: 34, SEQ ID NO: 35, SEQ ID NO: 36, SEQ ID NO: 37, SEQ ID NO: 38, SEQ ID NO: 39, SEQ ID NO: 40, SEQ ID NO: 41, SEQ ID NO: 42, SEQ ID NO: 43, SEQ ID NO: 44, SEQ ID NO: 45, SEQ ID NO: 46, SEQ ID NO: 47, SEQ ID NO: 48, SEQ ID NO: 49, SEQ ID NO: 50, SEQ ID NO: 51, SEQ ID NO: 52, or SEQ ID NO: 53.

[0185] In some examples of any of the ABPCs described herein, the first antigen-binding domain includes a light chain variable domain comprising SEQ ID NO: 56, and a heavy chain variable domain comprising SEQ ID NO: 1, SEQ ID NO: 13, SEQ ID NO: 14, SEQ ID NO: 15, SEQ ID NO: 16, SEQ ID NO: 17, SEQ ID NO: 18, SEQ ID NO: 19, SEQ ID NO: 20, SEQ ID NO: 21, SEQ ID NO: 22, SEQ ID NO: 23, SEQ ID NO: 24, SEQ ID NO: 25, SEQ ID NO: 26, SEQ ID NO: 27, SEQ ID NO: 28, SEQ ID NO: 29, SEQ ID NO: 30, SEQ ID NO: 31, SEQ ID NO: 32, SEQ ID NO: 33, SEQ ID NO: 34, SEQ ID NO: 35, SEQ ID NO: 36, SEQ ID NO: 37, SEQ ID NO: 38, SEQ ID NO: 39, SEQ ID NO: 40, SEQ ID NO: 41, SEQ ID NO: 42, SEQ ID NO: 43, SEQ ID NO: 44, SEQ ID NO: 45, SEQ ID NO: 46, SEQ ID NO: 47, SEQ ID NO: 48, SEQ ID NO: 49, SEQ ID NO: 50, SEQ ID NO: 51, SEQ ID NO: 52, or SEQ ID NO: 53.

[0186] In some examples of any of the ABPCs described herein, the first antigen-binding domain includes a light chain variable domain comprising SEQ ID NO: 57, and a heavy chain variable domain comprising SEQ ID NO: 1, SEQ ID NO: 13, SEQ ID NO: 14, SEQ ID NO: 15, SEQ ID NO: 16, SEQ ID NO: 17, SEQ ID NO: 18, SEQ ID NO: 19, SEQ ID NO: 20, SEQ ID NO: 21, SEQ ID NO: 22, SEQ ID NO: 23, SEQ ID NO: 24, SEQ ID NO: 25, SEQ ID NO: 26, SEQ ID NO: 27, SEQ ID NO: 28, SEQ ID NO: 29, SEQ ID NO: 30, SEQ ID NO: 31, SEQ ID NO: 32, SEQ ID NO: 33, SEQ ID NO: 34, SEQ ID NO: 35, SEQ ID NO: 36, SEQ ID NO: 37, SEQ ID NO: 38, SEQ ID NO: 39, SEQ ID NO: 40, SEQ ID NO: 41, SEQ ID NO: 42, SEQ ID NO: 43, SEQ ID NO: 44, SEQ ID NO: 45, SEQ ID NO: 46, SEQ ID NO: 47, SEQ ID NO: 48, SEQ ID NO: 49, SEQ ID NO: 50, SEQ ID NO: 51, SEQ ID NO: 52, or SEQ ID NO: 53.

[0187] In some examples of any of the ABPCs described herein, the first antigen-binding domain includes a light chain variable domain comprising SEQ ID NO: 58, and a heavy chain variable domain comprising SEQ ID NO: 1, SEQ ID NO: 13, SEQ ID NO: 14, SEQ ID NO: 15, SEQ ID NO: 16, SEQ ID NO: 17, SEQ ID NO: 18, SEQ ID NO: 19, SEQ ID NO: 20, SEQ ID NO: 21, SEQ ID NO: 22, SEQ ID NO: 23, SEQ ID NO: 24, SEQ ID NO: 25, SEQ ID NO: 26, SEQ ID NO: 27, SEQ ID NO: 28, SEQ ID NO: 29, SEQ ID NO: 30, SEQ ID NO: 31, SEQ ID NO: 32, SEQ ID NO: 33, SEQ ID NO: 34, SEQ ID NO: 35, SEQ ID NO: 36, SEQ ID NO: 37, SEQ ID NO: 38, SEQ ID NO: 39, SEQ ID NO: 40, SEQ ID NO: 41, SEQ ID NO: 42, SEQ ID NO: 43, SEQ ID NO: 44, SEQ ID NO: 45, SEQ ID NO: 46, SEQ ID NO: 47, SEQ ID NO: 48, SEQ ID NO: 49, SEQ ID NO: 50, SEQ ID NO: 51, SEQ ID NO: 52, or SEQ ID NO: 53.

[0188] In some examples of any of the ABPCs described herein, the first antigen-binding domain includes a light chain variable domain comprising SEQ ID NO: 59, and a heavy chain variable domain comprising SEQ ID NO: 1, SEQ ID NO: 13, SEQ ID NO: 14, SEQ ID NO: 15, SEQ ID NO: 16, SEQ ID NO: 17, SEQ ID NO: 18, SEQ ID NO: 19, SEQ ID NO: 20, SEQ ID NO: 21, SEQ ID NO: 22, SEQ ID NO: 23, SEQ ID NO: 24, SEQ ID NO: 25, SEQ ID NO: 26, SEQ ID NO: 27, SEQ ID NO: 28, SEQ ID NO: 29, SEQ ID NO: 30, SEQ ID NO: 31, SEQ ID NO: 32, SEQ ID NO: 33, SEQ ID NO: 34, SEQ ID NO: 35, SEQ ID NO: 36, SEQ ID NO: 37, SEQ ID NO: 38, SEQ ID NO: 39, SEQ ID NO: 40, SEQ ID NO: 41, SEQ ID NO: 42, SEQ ID NO: 43, SEQ ID NO: 44, SEQ ID NO: 45, SEQ ID NO: 46, SEQ ID NO: 47, SEQ ID NO: 48, SEQ ID NO: 49, SEQ ID NO: 50, SEQ ID NO: 51, SEQ ID NO: 52, or SEQ ID NO: 53.

[0189] In some examples of any of the ABPCs described herein, the first antigen-binding domain includes a light chain variable domain comprising SEQ ID NO: 60, and a heavy chain variable domain comprising SEQ ID NO: 1, SEQ ID NO: 13, SEQ ID NO: 14, SEQ ID NO: 15, SEQ ID NO: 16, SEQ ID NO: 17, SEQ ID NO: 18, SEQ ID NO: 19, SEQ ID NO: 20, SEQ ID NO: 21, SEQ ID NO: 22, SEQ ID NO: 23, SEQ ID NO: 24, SEQ ID NO: 25, SEQ ID NO: 26, SEQ ID NO: 27, SEQ ID NO: 28, SEQ ID NO: 29, SEQ ID NO: 30, SEQ ID NO: 31, SEQ ID NO: 32, SEQ ID NO: 33, SEQ ID NO: 34, SEQ ID NO: 35, SEQ ID NO: 36, SEQ ID NO: 37, SEQ ID NO: 38, SEQ ID NO: 39, SEQ ID NO: 40, SEQ ID NO: 41, SEQ ID NO: 42, SEQ ID NO: 43, SEQ ID NO: 44, SEQ ID NO: 45, SEQ ID NO: 46, SEQ ID NO: 47, SEQ ID NO: 48, SEQ ID NO: 49, SEQ ID NO: 50, SEQ ID NO: 51, SEQ ID NO: 52, or SEQ ID NO: 53.

[0190] In some examples of any of the ABPCs described herein, the first antigen-binding domain includes a light chain variable domain comprising SEQ ID NO: 61, and a heavy chain variable domain comprising SEQ ID NO: 1, SEQ ID NO: 13, SEQ ID NO: 14, SEQ ID NO: 15, SEQ ID NO: 16, SEQ ID NO: 17, SEQ ID NO: 18, SEQ ID NO: 19, SEQ ID NO: 20, SEQ ID NO: 21, SEQ ID NO: 22, SEQ ID NO: 23, SEQ ID NO: 24, SEQ ID NO: 25, SEQ ID NO: 26, SEQ ID NO: 27, SEQ ID NO: 28, SEQ ID NO: 29, SEQ ID NO: 30, SEQ ID NO: 31, SEQ ID NO: 32, SEQ ID NO: 33, SEQ ID NO: 34, SEQ ID NO: 35, SEQ ID NO: 36, SEQ ID NO: 37, SEQ ID NO: 38, SEQ ID NO: 39, SEQ ID NO: 40, SEQ ID NO: 41, SEQ ID NO: 42, SEQ ID NO: 43, SEQ ID NO: 44, SEQ ID NO: 45, SEQ ID NO: 46, SEQ ID NO: 47, SEQ ID NO: 48, SEQ ID NO: 49, SEQ ID NO: 50, SEQ ID NO: 51, SEQ ID NO: 52, or SEQ ID NO: 53.

[0191] In some examples of any of the ABPCs described herein, the first antigen-binding domain includes a light chain variable domain comprising SEQ ID NO: 62, and a heavy chain variable domain comprising SEQ ID NO: 1, SEQ ID NO: 13, SEQ ID NO: 14, SEQ ID NO: 15, SEQ ID NO: 16, SEQ ID NO: 17, SEQ ID NO: 18, SEQ ID NO: 19, SEQ ID NO: 20, SEQ ID NO: 21, SEQ ID NO: 22, SEQ ID NO: 23, SEQ ID NO: 24, SEQ ID NO: 25, SEQ ID NO: 26, SEQ ID NO: 27, SEQ ID NO: 28, SEQ ID NO: 29, SEQ ID NO: 30, SEQ ID NO: 31, SEQ ID NO: 32, SEQ ID NO: 33, SEQ ID NO: 34, SEQ ID NO: 35, SEQ ID NO: 36, SEQ ID NO: 37, SEQ ID NO: 38, SEQ ID NO: 39, SEQ ID NO: 40, SEQ ID NO: 41, SEQ ID NO: 42, SEQ ID NO: 43, SEQ ID NO: 44, SEQ ID NO: 45, SEQ ID NO: 46, SEQ ID NO: 47, SEQ ID NO: 48, SEQ ID NO: 49, SEQ ID NO: 50, SEQ ID NO: 51, SEQ ID NO: 52, or SEQ ID NO: 53.

[0192] In some examples of any of the ABPCs described herein, the first antigen-binding domain includes a light chain variable domain comprising SEQ ID NO: 63, and a heavy chain variable domain comprising SEQ ID NO: 1, SEQ ID NO: 13, SEQ ID NO: 14, SEQ ID NO: 15, SEQ ID NO: 16, SEQ ID NO: 17, SEQ ID NO: 18, SEQ ID NO: 19, SEQ ID NO: 20, SEQ ID NO: 21, SEQ ID NO: 22, SEQ ID NO: 23, SEQ ID NO: 24, SEQ ID NO: 25, SEQ ID NO: 26, SEQ ID NO: 27, SEQ ID NO: 28, SEQ ID NO: 29, SEQ ID NO: 30, SEQ ID NO: 31, SEQ ID NO: 32, SEQ ID NO: 33, SEQ ID NO: 34, SEQ ID NO: 35, SEQ ID NO: 36, SEQ ID NO: 37, SEQ ID NO: 38, SEQ ID NO: 39, SEQ ID NO: 40, SEQ ID NO: 41, SEQ ID NO: 42, SEQ ID NO: 43, SEQ ID NO: 44, SEQ ID NO: 45, SEQ ID NO: 46, SEQ ID NO: 47, SEQ ID NO: 48, SEQ ID NO: 49, SEQ ID NO: 50, SEQ ID NO: 51, SEQ ID NO: 52, or SEQ ID NO: 53.

[0193] In some examples of any of the ABPCs described herein, the first antigen-binding domain includes a light chain variable domain comprising SEQ ID NO: 64, and a heavy chain variable domain comprising SEQ ID NO: 1, SEQ ID NO: 13, SEQ ID NO: 14, SEQ ID NO: 15, SEQ ID NO: 16, SEQ ID NO: 17, SEQ ID NO: 18, SEQ ID NO: 19, SEQ ID NO: 20, SEQ ID NO: 21, SEQ ID NO: 22, SEQ ID NO: 23, SEQ ID NO: 24, SEQ ID NO: 25, SEQ ID NO: 26, SEQ ID NO: 27, SEQ ID NO: 28, SEQ ID NO: 29, SEQ ID NO: 30, SEQ ID NO: 31, SEQ ID NO: 32, SEQ ID NO: 33, SEQ ID NO: 34, SEQ ID NO: 35, SEQ ID NO: 36, SEQ ID NO: 37, SEQ ID NO: 38, SEQ ID NO: 39, SEQ ID NO: 40, SEQ ID NO: 41, SEQ ID NO: 42, SEQ ID NO: 43, SEQ ID NO: 44, SEQ ID NO: 45, SEQ ID NO: 46, SEQ ID NO: 47, SEQ ID NO: 48, SEQ ID NO: 49, SEQ ID NO: 50, SEQ ID NO: 51, SEQ ID NO: 52, or SEQ ID NO: 53.

[0194] In some examples of any of the ABPCs described herein, the first antigen-binding domain includes a light chain variable domain comprising SEQ ID NO: 65, and a heavy chain variable domain comprising SEQ ID NO: 1, SEQ ID NO: 13, SEQ ID NO: 14, SEQ ID NO: 15, SEQ ID NO: 16, SEQ ID NO: 17, SEQ ID NO: 18, SEQ ID NO: 19, SEQ ID NO: 20, SEQ ID NO: 21, SEQ ID NO: 22, SEQ ID NO: 23, SEQ ID NO: 24, SEQ ID NO: 25, SEQ ID NO: 26, SEQ ID NO: 27, SEQ ID NO: 28, SEQ ID NO: 29, SEQ ID NO: 30, SEQ ID NO: 31, SEQ ID NO: 32, SEQ ID NO: 33, SEQ ID NO: 34, SEQ ID NO: 35, SEQ ID NO: 36, SEQ ID NO: 37, SEQ ID NO: 38, SEQ ID NO: 39, SEQ ID NO: 40, SEQ ID NO: 41, SEQ ID NO: 42, SEQ ID NO: 43, SEQ ID NO: 44, SEQ ID NO: 45, SEQ ID NO: 46, SEQ ID NO: 47, SEQ ID NO: 48, SEQ ID NO: 49, SEQ ID NO: 50, SEQ ID NO: 51, SEQ ID NO: 52, or SEQ ID NO: 53.

[0195] In some examples of any of the ABPCs described herein, the first antigen-binding domain includes a light chain variable domain comprising SEQ ID NO: 66, and a heavy chain variable domain comprising SEQ ID NO: 1, SEQ ID NO: 13, SEQ ID NO: 14, SEQ ID NO: 15, SEQ ID NO: 16, SEQ ID NO: 17, SEQ ID NO: 18, SEQ ID NO: 19, SEQ ID NO: 20, SEQ ID NO: 21, SEQ ID NO: 22, SEQ ID NO: 23, SEQ ID NO: 24, SEQ ID NO: 25, SEQ ID NO: 26, SEQ ID NO: 27, SEQ ID NO: 28, SEQ ID NO: 29, SEQ ID NO: 30, SEQ ID NO: 31, SEQ ID NO: 32, SEQ ID NO: 33, SEQ ID NO: 34, SEQ ID NO: 35, SEQ ID NO: 36, SEQ ID NO: 37, SEQ ID NO: 38, SEQ ID NO: 39, SEQ ID NO: 40, SEQ ID NO: 41, SEQ ID NO: 42, SEQ ID NO: 43, SEQ ID NO: 44, SEQ ID NO: 45, SEQ ID NO: 46, SEQ ID NO: 47, SEQ ID NO: 48, SEQ ID NO: 49, SEQ ID NO: 50, SEQ ID NO: 51, SEQ ID NO: 52, or SEQ ID NO: 53.

[0196] In some examples of any of the ABPCs described herein, the first antigen-binding domain includes a light chain variable domain comprising SEQ ID NO: 67, and a heavy chain variable domain comprising SEQ ID NO: 1, SEQ ID NO: 13, SEQ ID NO: 14, SEQ ID NO: 15, SEQ ID NO: 16, SEQ ID NO: 17, SEQ ID NO: 18, SEQ ID NO: 19, SEQ ID NO: 20, SEQ ID NO: 21, SEQ ID NO: 22, SEQ ID NO: 23, SEQ ID NO: 24, SEQ ID NO: 25, SEQ ID NO: 26, SEQ ID NO: 27, SEQ ID NO: 28, SEQ ID NO: 29, SEQ ID NO: 30, SEQ ID NO: 31, SEQ ID NO: 32, SEQ ID NO: 33, SEQ ID NO: 34, SEQ ID NO: 35, SEQ ID NO: 36, SEQ ID NO: 37, SEQ ID NO: 38, SEQ ID NO: 39, SEQ ID NO: 40, SEQ ID NO: 41, SEQ ID NO: 42, SEQ ID NO: 43, SEQ ID NO: 44, SEQ ID NO: 45, SEQ ID NO: 46, SEQ ID NO: 47, SEQ ID NO: 48, SEQ ID NO: 49, SEQ ID NO: 50, SEQ ID NO: 51, SEQ ID NO: 52, or SEQ ID NO: 53.

[0197] In some examples of any of the ABPCs described herein, the first antigen-binding domain includes a light chain variable domain comprising SEQ ID NO: 68, and a heavy chain variable domain comprising SEQ ID NO: 1, SEQ ID NO: 13, SEQ ID NO: 14, SEQ ID NO: 15, SEQ ID NO: 16, SEQ ID NO: 17, SEQ ID NO: 18, SEQ ID NO: 19, SEQ ID NO: 20, SEQ ID NO: 21, SEQ ID NO: 22, SEQ ID NO: 23, SEQ ID NO: 24, SEQ ID NO: 25, SEQ ID NO: 26, SEQ ID NO: 27, SEQ ID NO: 28, SEQ ID NO: 29, SEQ ID NO: 30, SEQ ID NO: 31, SEQ ID NO: 32, SEQ ID NO: 33, SEQ ID NO: 34, SEQ ID NO: 35, SEQ ID NO: 36, SEQ ID NO: 37, SEQ ID NO: 38, SEQ ID NO: 39, SEQ ID NO: 40, SEQ ID NO: 41, SEQ ID NO: 42, SEQ ID NO: 43, SEQ ID NO: 44, SEQ ID NO: 45, SEQ ID NO: 46, SEQ ID NO: 47, SEQ ID NO: 48, SEQ ID NO: 49, SEQ ID NO: 50, SEQ ID NO: 51, SEQ ID NO: 52, or SEQ ID NO: 53.

[0198] In some examples of any of the ABPCs described herein, the first antigen-binding domain includes a light chain variable domain comprising SEQ ID NO: 69, and a heavy chain variable domain comprising SEQ ID NO: 1, SEQ ID NO: 13, SEQ ID NO: 14, SEQ ID NO: 15, SEQ ID NO: 16, SEQ ID NO: 17, SEQ ID NO: 18, SEQ ID NO: 19, SEQ ID NO: 20, SEQ ID NO: 21, SEQ ID NO: 22, SEQ ID NO: 23, SEQ ID NO: 24, SEQ ID NO: 25, SEQ ID NO: 26, SEQ ID NO: 27, SEQ ID NO: 28, SEQ ID NO: 29, SEQ ID NO: 30, SEQ ID NO: 31, SEQ ID NO: 32, SEQ ID NO: 33, SEQ ID NO: 34, SEQ ID NO: 35, SEQ ID NO: 36, SEQ ID NO: 37, SEQ ID NO: 38, SEQ ID NO: 39, SEQ ID NO: 40, SEQ ID NO: 41, SEQ ID NO: 42, SEQ ID NO: 43, SEQ ID NO: 44, SEQ ID NO: 45, SEQ ID NO: 46, SEQ ID NO: 47, SEQ ID NO: 48, SEQ ID NO: 49, SEQ ID NO: 50, SEQ ID NO: 51, SEQ ID NO: 52, or SEQ ID NO: 53.

[0199] In some examples of any of the ABPCs described herein, the first antigen-binding domain includes a light chain variable domain comprising SEQ ID NO: 70, and a heavy chain variable domain comprising SEQ ID NO: 1, SEQ ID NO: 13, SEQ ID NO: 14, SEQ ID NO: 15, SEQ ID NO: 16, SEQ ID NO: 17, SEQ ID NO: 18, SEQ ID NO: 19, SEQ ID NO: 20, SEQ ID NO: 21, SEQ ID NO: 22, SEQ ID NO: 23, SEQ ID NO: 24, SEQ ID NO: 25, SEQ ID NO: 26, SEQ ID NO: 27, SEQ ID NO: 28, SEQ ID NO: 29, SEQ ID NO: 30, SEQ ID NO: 31, SEQ ID NO: 32, SEQ ID NO: 33, SEQ ID NO: 34, SEQ ID NO: 35, SEQ ID NO: 36, SEQ ID NO: 37, SEQ ID NO: 38, SEQ ID NO: 39, SEQ ID NO: 40, SEQ ID NO: 41, SEQ ID NO: 42, SEQ ID NO: 43, SEQ ID NO: 44, SEQ ID NO: 45, SEQ ID NO: 46, SEQ ID NO: 47, SEQ ID NO: 48, SEQ ID NO: 49, SEQ ID NO: 50, SEQ ID NO: 51, SEQ ID NO: 52, or SEQ ID NO: 53.

[0200] In some examples of any of the ABPCs described herein, the first antigen-binding domain includes a light chain variable domain comprising SEQ ID NO: 71, and a heavy chain variable domain comprising SEQ ID NO: 1, SEQ ID NO: 13, SEQ ID NO: 14, SEQ ID NO: 15, SEQ ID NO: 16, SEQ ID NO: 17, SEQ ID NO: 18, SEQ ID NO: 19, SEQ ID NO: 20, SEQ ID NO: 21, SEQ ID NO: 22, SEQ ID NO: 23, SEQ ID NO: 24, SEQ ID NO: 25, SEQ ID NO: 26, SEQ ID NO: 27, SEQ ID NO: 28, SEQ ID NO: 29, SEQ ID NO: 30, SEQ ID NO: 31, SEQ ID NO: 32, SEQ ID NO: 33, SEQ ID NO: 34, SEQ ID NO: 35, SEQ ID NO: 36, SEQ ID NO: 37, SEQ ID NO: 38, SEQ ID NO: 39, SEQ ID NO: 40, SEQ ID NO: 41, SEQ ID NO: 42, SEQ ID NO: 43, SEQ ID NO: 44, SEQ ID NO: 45, SEQ ID NO: 46, SEQ ID NO: 47, SEQ ID NO: 48, SEQ ID NO: 49, SEQ ID NO: 50, SEQ ID NO: 51, SEQ ID NO: 52, or SEQ ID NO: 53.

[0201] In some examples of any of the ABPCs described herein, the first antigen-binding domain includes a light chain variable domain comprising SEQ ID NO: 72, and a heavy chain variable domain comprising SEQ ID NO: 1, SEQ ID NO: 13, SEQ ID NO: 14, SEQ ID NO: 15, SEQ ID NO: 16, SEQ ID NO: 17, SEQ ID NO: 18, SEQ ID NO: 19, SEQ ID NO: 20, SEQ ID NO: 21, SEQ ID NO: 22, SEQ ID NO: 23, SEQ ID NO: 24, SEQ ID NO: 25, SEQ ID NO: 26, SEQ ID NO: 27, SEQ ID NO: 28, SEQ ID NO: 29, SEQ ID NO: 30, SEQ ID NO: 31, SEQ ID NO: 32, SEQ ID NO: 33, SEQ ID NO: 34, SEQ ID NO: 35, SEQ ID NO: 36, SEQ ID NO: 37, SEQ ID NO: 38, SEQ ID NO: 39, SEQ ID NO: 40, SEQ ID NO: 41, SEQ ID NO: 42, SEQ ID NO: 43, SEQ ID NO: 44, SEQ ID NO: 45, SEQ ID NO: 46, SEQ ID NO: 47, SEQ ID NO: 48, SEQ ID NO: 49, SEQ ID NO: 50, SEQ ID NO: 51, SEQ ID NO: 52, or SEQ ID NO: 53.

[0202] In some examples of any of the ABPCs described herein, the first antigen-binding domain includes a light chain variable domain comprising SEQ ID NO: 73, and a heavy chain variable domain comprising SEQ ID NO: 1, SEQ ID NO: 13, SEQ ID NO: 14, SEQ ID NO: 15, SEQ ID NO: 16, SEQ ID NO: 17, SEQ ID NO: 18, SEQ ID NO: 19, SEQ ID NO: 20, SEQ ID NO: 21, SEQ ID NO: 22, SEQ ID NO: 23, SEQ ID NO: 24, SEQ ID NO: 25, SEQ ID NO: 26, SEQ ID NO: 27, SEQ ID NO: 28, SEQ ID NO: 29, SEQ ID NO: 30, SEQ ID NO: 31, SEQ ID NO: 32, SEQ ID NO: 33, SEQ ID NO: 34, SEQ ID NO: 35, SEQ ID NO: 36, SEQ ID NO: 37, SEQ ID NO: 38, SEQ ID NO: 39, SEQ ID NO: 40, SEQ ID NO: 41, SEQ ID NO: 42, SEQ ID NO: 43, SEQ ID NO: 44, SEQ ID NO: 45, SEQ ID NO: 46, SEQ ID NO: 47, SEQ ID NO: 48, SEQ ID NO: 49, SEQ ID NO: 50, SEQ ID NO: 51, SEQ ID NO: 52, or SEQ ID NO: 53.

[0203] In some examples of any of the ABPCs described herein, the first antigen-binding domain includes a light chain variable domain comprising SEQ ID NO: 74, and a heavy chain variable domain comprising SEQ ID NO: 1, SEQ ID NO: 13, SEQ ID NO: 14, SEQ ID NO: 15, SEQ ID NO: 16, SEQ ID NO: 17, SEQ ID NO: 18, SEQ ID NO: 19, SEQ ID NO: 20, SEQ ID NO: 21, SEQ ID NO: 22, SEQ ID NO: 23, SEQ ID NO: 24, SEQ ID NO: 25, SEQ ID NO: 26, SEQ ID NO: 27, SEQ ID NO: 28, SEQ ID NO: 29, SEQ ID NO: 30, SEQ ID NO: 31, SEQ ID NO: 32, SEQ ID NO: 33, SEQ ID NO: 34, SEQ ID NO: 35, SEQ ID NO: 36, SEQ ID NO: 37, SEQ ID NO: 38, SEQ ID NO: 39, SEQ ID NO: 40, SEQ ID NO: 41, SEQ ID NO: 42, SEQ ID NO: 43, SEQ ID NO: 44, SEQ ID NO: 45, SEQ ID NO: 46, SEQ ID NO: 47, SEQ ID NO: 48, SEQ ID NO: 49, SEQ ID NO: 50, SEQ ID NO: 51, SEQ ID NO: 52, or SEQ ID NO: 53.

[0204] In some examples of any of the ABPCs described herein, the first antigen-binding domain includes a light chain variable domain comprising SEQ ID NO: 75, and a heavy chain variable domain comprising SEQ ID NO: 1, SEQ ID NO: 13, SEQ ID NO: 14, SEQ ID NO: 15, SEQ ID NO: 16, SEQ ID NO: 17, SEQ ID NO: 18, SEQ ID NO: 19, SEQ ID NO: 20, SEQ ID NO: 21, SEQ ID NO: 22, SEQ ID NO: 23, SEQ ID NO: 24, SEQ ID NO: 25, SEQ ID NO: 26, SEQ ID NO: 27, SEQ ID NO: 28, SEQ ID NO: 29, SEQ ID NO: 30, SEQ ID NO: 31, SEQ ID NO: 32, SEQ ID NO: 33, SEQ ID NO: 34, SEQ ID NO: 35, SEQ ID NO: 36, SEQ ID NO: 37, SEQ ID NO: 38, SEQ ID NO: 39, SEQ ID NO: 40, SEQ ID NO: 41, SEQ ID NO: 42, SEQ ID NO: 43, SEQ ID NO: 44, SEQ ID NO: 45, SEQ ID NO: 46, SEQ ID NO: 47, SEQ ID NO: 48, SEQ ID NO: 49, SEQ ID NO: 50, SEQ ID NO: 51, SEQ ID NO: 52, or SEQ ID NO: 53.

[0205] In some examples of any of the ABPCs described herein, the first antigen-binding domain includes a light chain variable domain comprising SEQ ID NO: 76, and a heavy chain variable domain comprising SEQ ID NO: 1, SEQ ID NO: 13, SEQ ID NO: 14, SEQ ID NO: 15, SEQ ID NO: 16, SEQ ID NO: 17, SEQ ID NO: 18, SEQ ID NO: 19, SEQ ID NO: 20, SEQ ID NO: 21, SEQ ID NO: 22, SEQ ID NO: 23, SEQ ID NO: 24, SEQ ID NO: 25, SEQ ID NO: 26, SEQ ID NO: 27, SEQ ID NO: 28, SEQ ID NO: 29, SEQ ID NO: 30, SEQ ID NO: 31, SEQ ID NO: 32, SEQ ID NO: 33, SEQ ID NO: 34, SEQ ID NO: 35, SEQ ID NO: 36, SEQ ID NO: 37, SEQ ID NO: 38, SEQ ID NO: 39, SEQ ID NO: 40, SEQ ID NO: 41, SEQ ID NO: 42, SEQ ID NO: 43, SEQ ID NO: 44, SEQ ID NO: 45, SEQ ID NO: 46, SEQ ID NO: 47, SEQ ID NO: 48, SEQ ID NO: 49, SEQ ID NO: 50, SEQ ID NO: 51, SEQ ID NO: 52, or SEQ ID NO: 53.

[0206] In some examples of any of the ABPCs described herein, the first antigen-binding domain includes a light chain variable domain comprising SEQ ID NO: 77, and a heavy chain variable domain comprising SEQ ID NO: 1, SEQ ID NO: 13, SEQ ID NO: 14, SEQ ID NO: 15, SEQ ID NO: 16, SEQ ID NO: 17, SEQ ID NO: 18, SEQ ID NO: 19, SEQ ID NO: 20, SEQ ID NO: 21, SEQ ID NO: 22, SEQ ID NO: 23, SEQ ID NO: 24, SEQ ID NO: 25, SEQ ID NO: 26, SEQ ID NO: 27, SEQ ID NO: 28, SEQ ID NO: 29, SEQ ID NO: 30, SEQ ID NO: 31, SEQ ID NO: 32, SEQ ID NO: 33, SEQ ID NO: 34, SEQ ID NO: 35, SEQ ID NO: 36, SEQ ID NO: 37, SEQ ID NO: 38, SEQ ID NO: 39, SEQ ID NO: 40, SEQ ID NO: 41, SEQ ID NO: 42, SEQ ID NO: 43, SEQ ID NO: 44, SEQ ID NO: 45, SEQ ID NO: 46, SEQ ID NO: 47, SEQ ID NO: 48, SEQ ID NO: 49, SEQ ID NO: 50, SEQ ID NO: 51, SEQ ID NO: 52, or SEQ ID NO: 53.

[0207] In some examples of any of the ABPCs described herein, the first antigen-binding domain includes a light chain variable domain comprising SEQ ID NO: 78, and a heavy chain variable domain comprising SEQ ID NO: 1, SEQ ID NO: 13, SEQ ID NO: 14, SEQ ID NO: 15, SEQ ID NO: 16, SEQ ID NO: 17, SEQ ID NO: 18, SEQ ID NO: 19, SEQ ID NO: 20, SEQ ID NO: 21, SEQ ID NO: 22, SEQ ID NO: 23, SEQ ID NO: 24, SEQ ID NO: 25, SEQ ID NO: 26, SEQ ID NO: 27, SEQ ID NO: 28, SEQ ID NO: 29, SEQ ID NO: 30, SEQ ID NO: 31, SEQ ID NO: 32, SEQ ID NO: 33, SEQ ID NO: 34, SEQ ID NO: 35, SEQ ID NO: 36, SEQ ID NO: 37, SEQ ID NO: 38, SEQ ID NO: 39, SEQ ID NO: 40, SEQ ID NO: 41, SEQ ID NO: 42, SEQ ID NO: 43, SEQ ID NO: 44, SEQ ID NO: 45, SEQ ID NO: 46, SEQ ID NO: 47, SEQ ID NO: 48, SEQ ID NO: 49, SEQ ID NO: 50, SEQ ID NO: 51, SEQ ID NO: 52, or SEQ ID NO: 53.

[0208] In some examples of any of the ABPCs described herein, the first antigen-binding domain includes a light chain variable domain comprising SEQ ID NO: 79, and a heavy chain variable domain comprising SEQ ID NO: 1, SEQ ID NO: 13, SEQ ID NO: 14, SEQ ID NO: 15, SEQ ID NO: 16, SEQ ID NO: 17, SEQ ID NO: 18, SEQ ID NO: 19, SEQ ID NO: 20, SEQ ID NO: 21, SEQ ID NO: 22, SEQ ID NO: 23, SEQ ID NO: 24, SEQ ID NO: 25, SEQ ID NO: 26, SEQ ID NO: 27, SEQ ID NO: 28, SEQ ID NO: 29, SEQ ID NO: 30, SEQ ID NO: 31, SEQ ID NO: 32, SEQ ID NO: 33, SEQ ID NO: 34, SEQ ID NO: 35, SEQ ID NO: 36, SEQ ID NO: 37, SEQ ID NO: 38, SEQ ID NO: 39, SEQ ID NO: 40, SEQ ID NO: 41, SEQ ID NO: 42, SEQ ID NO: 43, SEQ ID NO: 44, SEQ ID NO: 45, SEQ ID NO: 46, SEQ ID NO: 47, SEQ ID NO: 48, SEQ ID NO: 49, SEQ ID NO: 50, SEQ ID NO: 51, SEQ ID NO: 52, or SEQ ID NO: 53.

[0209] In some examples of any of the ABPCs described herein, the first antigen-binding domain includes a light chain variable domain comprising SEQ ID NO: 80, and a heavy chain variable domain comprising SEQ ID NO: 1, SEQ ID NO: 13, SEQ ID NO: 14, SEQ ID NO: 15, SEQ ID NO: 16, SEQ ID NO: 17, SEQ ID NO: 18, SEQ ID NO: 19, SEQ ID NO: 20, SEQ ID NO: 21, SEQ ID NO: 22, SEQ ID NO: 23, SEQ ID NO: 24, SEQ ID NO: 25, SEQ ID NO: 26, SEQ ID NO: 27, SEQ ID NO: 28, SEQ ID NO: 29, SEQ ID NO: 30, SEQ ID NO: 31, SEQ ID NO: 32, SEQ ID NO: 33, SEQ ID NO: 34, SEQ ID NO: 35, SEQ ID NO: 36, SEQ ID NO: 37, SEQ ID NO: 38, SEQ ID NO: 39, SEQ ID NO: 40, SEQ ID NO: 41, SEQ ID NO: 42, SEQ ID NO: 43, SEQ ID NO: 44, SEQ ID NO: 45, SEQ ID NO: 46, SEQ ID NO: 47, SEQ ID NO: 48, SEQ ID NO: 49, SEQ ID NO: 50, SEQ ID NO: 51, SEQ ID NO: 52, or SEQ ID NO: 53.

[0210] In some examples of any of the ABPCs described herein, the first antigen-binding domain includes a heavy chain variable domain of SEQ ID NO: 81, SEQ ID NO: 82, SEQ ID NO: 83, SEQ ID NO: 84, SEQ ID NO: 85, SEQ ID NO: 86, SEQ ID NO: 87, SEQ ID NO: 88, SEQ ID NO: 89, SEQ ID NO: 90, SEQ ID NO: 91, SEQ ID NO: 92, SEQ ID NO: 93, SEQ ID NO: 94, SEQ ID NO: 95, SEQ ID NO: 96, SEQ ID NO: 97, or SEQ ID NO: 98. In some examples of any of the ABPCs described herein, the first antigen-binding domain includes a light chain variable domain comprising SEQ ID NO: 2, SEQ ID NO: 54, SEQ ID NO: 55, SEQ ID NO: 56, SEQ ID NO: 57, SEQ ID NO: 58, SEQ ID NO: 59, SEQ ID NO: 60, SEQ ID NO: 61, SEQ ID NO: 62, SEQ ID NO: 63, SEQ ID NO: 64, SEQ ID NO: 65, SEQ ID NO: 66, SEQ ID NO: 67, SEQ ID NO: 68, SEQ ID NO: 69, SEQ ID NO: 70, SEQ ID NO: 71, SEQ ID NO: 72, SEQ ID NO: 73, SEQ ID NO: 74, SEQ ID NO: 75, SEQ ID NO: 76, SEQ ID NO: 77, SEQ ID NO: 78, SEQ ID NO: 79, or SEQ ID NO: 80.

[0211] In some examples of any of the ABPCs described herein, the first antigen-binding domain includes a heavy chain variable domain comprising SEQ ID NO: 81, and a light chain variable domain comprising SEQ ID NO: 2, SEQ ID NO: 54, SEQ ID NO: 55, SEQ ID NO: 56, SEQ ID NO: 57, SEQ ID NO: 58, SEQ ID NO: 59, SEQ ID NO: 60, SEQ ID NO: 61, SEQ ID NO: 62, SEQ ID NO: 63, SEQ ID NO: 64, SEQ ID NO: 65, SEQ ID NO: 66, SEQ ID NO: 67, SEQ ID NO: 68, SEQ ID NO: 69, SEQ ID NO: 70, SEQ ID NO: 71, SEQ ID NO: 72, SEQ ID NO: 73, SEQ ID NO: 74, SEQ ID NO: 75, SEQ ID NO: 76, SEQ ID NO: 77, SEQ ID NO: 78, SEQ ID NO: 79, or SEQ ID NO: 80.

[0212] In some examples of any of the ABPCs described herein, the first antigen-binding domain includes a heavy chain variable domain comprising SEQ ID NO: 82, and a light chain variable domain comprising SEQ ID NO: 2, SEQ ID NO: 54, SEQ ID NO: 55, SEQ ID NO: 56, SEQ ID NO: 57, SEQ ID NO: 58, SEQ ID NO: 59, SEQ ID NO: 60, SEQ ID NO: 61, SEQ ID NO: 62, SEQ ID NO: 63, SEQ ID NO: 64, SEQ ID NO: 65, SEQ ID NO: 66, SEQ ID NO: 67, SEQ ID NO: 68, SEQ ID NO: 69, SEQ ID NO: 70, SEQ ID NO: 71, SEQ ID NO: 72, SEQ ID NO: 73, SEQ ID NO: 74, SEQ ID NO: 75, SEQ ID NO: 76, SEQ ID NO: 77, SEQ ID NO: 78, SEQ ID NO: 79, or SEQ ID NO: 80 In some examples of any of the ABPCs described herein, the first antigen-binding domain includes a heavy chain variable domain comprising SEQ ID NO: 83, and a light chain variable domain comprising SEQ ID NO: 2, SEQ ID NO: 54, SEQ ID NO: 55, SEQ ID NO: 56, SEQ ID NO: 57, SEQ ID NO: 58, SEQ ID NO: 59, SEQ ID NO: 60, SEQ ID NO: 61, SEQ ID NO: 62, SEQ ID NO: 63, SEQ ID NO: 64, SEQ ID NO: 65, SEQ ID NO: 66, SEQ ID NO: 67, SEQ ID NO: 68, SEQ ID NO: 69, SEQ ID NO: 70, SEQ ID NO: 71, SEQ ID NO: 72, SEQ ID NO: 73, SEQ ID NO: 74, SEQ ID NO: 75, SEQ ID NO: 76, SEQ ID NO: 77, SEQ ID NO: 78, SEQ ID NO: 79, or SEQ ID NO: 80 In some examples of any of the ABPCs described herein, the first antigen-binding domain includes a heavy chain variable domain comprising SEQ ID NO: 84, and a light chain variable domain comprising SEQ ID NO: 2, SEQ ID NO: 54, SEQ ID NO: 55, SEQ ID NO: 56, SEQ ID NO: 57, SEQ ID NO: 58, SEQ ID NO: 59, SEQ ID NO: 60, SEQ ID NO: 61, SEQ ID NO: 62, SEQ ID NO: 63, SEQ ID NO: 64, SEQ ID NO: 65, SEQ ID NO: 66, SEQ ID NO: 67, SEQ ID NO: 68, SEQ ID NO: 69, SEQ ID NO: 70, SEQ ID NO: 71, SEQ ID NO: 72, SEQ ID NO: 73, SEQ ID NO: 74, SEQ ID NO: 75, SEQ ID NO: 76, SEQ ID NO: 77, SEQ ID NO: 78, SEQ ID NO: 79, or SEQ ID NO: 80.

[0213] In some examples of any of the ABPCs described herein, the first antigen-binding domain includes a heavy chain variable domain comprising SEQ ID NO: 85, and a light chain variable domain comprising SEQ ID NO: 2, SEQ ID NO: 54, SEQ ID NO: 55, SEQ ID NO: 56, SEQ ID NO: 57, SEQ ID NO: 58, SEQ ID NO: 59, SEQ ID NO: 60, SEQ ID NO: 61, SEQ ID NO: 62, SEQ ID NO: 63, SEQ ID NO: 64, SEQ ID NO: 65, SEQ ID NO: 66, SEQ ID NO: 67, SEQ ID NO: 68, SEQ ID NO: 69, SEQ ID NO: 70, SEQ ID NO: 71, SEQ ID NO: 72, SEQ ID NO: 73, SEQ ID NO: 74, SEQ ID NO: 75, SEQ ID NO: 76, SEQ ID NO: 77, SEQ ID NO: 78, SEQ ID NO: 79, or SEQ ID NO: 80.

[0214] In some examples of any of the ABPCs described herein, the first antigen-binding domain includes a heavy chain variable domain comprising SEQ ID NO: 86, and a light chain variable domain comprising SEQ ID NO: 2, SEQ ID NO: 54, SEQ ID NO: 55, SEQ ID NO: 56, SEQ ID NO: 57, SEQ ID NO: 58, SEQ ID NO: 59, SEQ ID NO: 60, SEQ ID NO: 61, SEQ ID NO: 62, SEQ ID NO: 63, SEQ ID NO: 64, SEQ ID NO: 65, SEQ ID NO: 66, SEQ ID NO: 67, SEQ ID NO: 68, SEQ ID NO: 69, SEQ ID NO: 70, SEQ ID NO: 71, SEQ ID NO: 72, SEQ ID NO: 73, SEQ ID NO: 74, SEQ ID NO: 75, SEQ ID NO: 76, SEQ ID NO: 77, SEQ ID NO: 78, SEQ ID NO: 79, or SEQ ID NO: 80.

[0215] In some examples of any of the ABPCs described herein, the first antigen-binding domain includes a heavy chain variable domain comprising SEQ ID NO: 87, and a light chain variable domain comprising SEQ ID NO: 2, SEQ ID NO: 54, SEQ ID NO: 55, SEQ ID NO: 56, SEQ ID NO: 57, SEQ ID NO: 58, SEQ ID NO: 59, SEQ ID NO: 60, SEQ ID NO: 61, SEQ ID NO: 62, SEQ ID NO: 63, SEQ ID NO: 64, SEQ ID NO: 65, SEQ ID NO: 66, SEQ ID NO: 67, SEQ ID NO: 68, SEQ ID NO: 69, SEQ ID NO: 70, SEQ ID NO: 71, SEQ ID NO: 72, SEQ ID NO: 73, SEQ ID NO: 74, SEQ ID NO: 75, SEQ ID NO: 76, SEQ ID NO: 77, SEQ ID NO: 78, SEQ ID NO: 79, or SEQ ID NO: 80.

[0216] In some examples of any of the ABPCs described herein, the first antigen-binding domain includes a heavy chain variable domain comprising SEQ ID NO: 88, and a light chain variable domain comprising SEQ ID NO: 2, SEQ ID NO: 54, SEQ ID NO: 55, SEQ ID NO: 56, SEQ ID NO: 57, SEQ ID NO: 58, SEQ ID NO: 59, SEQ ID NO: 60, SEQ ID NO: 61, SEQ ID NO: 62, SEQ ID NO: 63, SEQ ID NO: 64, SEQ ID NO: 65, SEQ ID NO: 66, SEQ ID NO: 67, SEQ ID NO: 68, SEQ ID NO: 69, SEQ ID NO: 70, SEQ ID NO: 71, SEQ ID NO: 72, SEQ ID NO: 73, SEQ ID NO: 74, SEQ ID NO: 75, SEQ ID NO: 76, SEQ ID NO: 77, SEQ ID NO: 78, SEQ ID NO: 79, or SEQ ID NO: 80.

[0217] In some examples of any of the ABPCs described herein, the first antigen-binding domain includes a heavy chain variable domain comprising SEQ ID NO: 89, and a light chain variable domain comprising SEQ ID NO: 2, SEQ ID NO: 54, SEQ ID NO: 55, SEQ ID NO: 56, SEQ ID NO: 57, SEQ ID NO: 58, SEQ ID NO: 59, SEQ ID NO: 60, SEQ ID NO: 61, SEQ ID NO: 62, SEQ ID NO: 63, SEQ ID NO: 64, SEQ ID NO: 65, SEQ ID NO: 66, SEQ ID NO: 67, SEQ ID NO: 68, SEQ ID NO: 69, SEQ ID NO: 70, SEQ ID NO: 71, SEQ ID NO: 72, SEQ ID NO: 73, SEQ ID NO: 74, SEQ ID NO: 75, SEQ ID NO: 76, SEQ ID NO: 77, SEQ ID NO: 78, SEQ ID NO: 79, or SEQ ID NO: 80.

[0218] In some examples of any of the ABPCs described herein, the first antigen-binding domain includes a heavy chain variable domain comprising SEQ ID NO: 90, and a light chain variable domain comprising SEQ ID NO: 2, SEQ ID NO: 54, SEQ ID NO: 55, SEQ ID NO: 56, SEQ ID NO: 57, SEQ ID NO: 58, SEQ ID NO: 59, SEQ ID NO: 60, SEQ ID NO: 61, SEQ ID NO: 62, SEQ ID NO: 63, SEQ ID NO: 64, SEQ ID NO: 65, SEQ ID NO: 66, SEQ ID NO: 67, SEQ ID NO: 68, SEQ ID NO: 69, SEQ ID NO: 70, SEQ ID NO: 71, SEQ ID NO: 72, SEQ ID NO: 73, SEQ ID NO: 74, SEQ ID NO: 75, SEQ ID NO: 76, SEQ ID NO: 77, SEQ ID NO: 78, SEQ ID NO: 79, SEQ ID NO: 80.

[0219] In some examples of any of the ABPCs described herein, the first antigen-binding domain includes a heavy chain variable domain comprising SEQ ID NO: 91, and a light chain variable domain comprising SEQ ID NO: 2, SEQ ID NO: 54, SEQ ID NO: 55, SEQ ID NO: 56, SEQ ID NO: 57, SEQ ID NO: 58, SEQ ID NO: 59, SEQ ID NO: 60, SEQ ID NO: 61, SEQ ID NO: 62, SEQ ID NO: 63, SEQ ID NO: 64, SEQ ID NO: 65, SEQ ID NO: 66, SEQ ID NO: 67, SEQ ID NO: 68, SEQ ID NO: 69, SEQ ID NO: 70, SEQ ID NO: 71, SEQ ID NO: 72, SEQ ID NO: 73, SEQ ID NO: 74, SEQ ID NO: 75, SEQ ID NO: 76, SEQ ID NO: 77, SEQ ID NO: 78, SEQ ID NO: 79, or SEQ ID NO: 80.

[0220] In some examples of any of the ABPCs described herein, the first antigen-binding domain includes a heavy chain variable domain comprising SEQ ID NO: 92, and a light chain variable domain comprising SEQ ID NO: 2, SEQ ID NO: 54, SEQ ID NO: 55, SEQ ID NO: 56, SEQ ID NO: 57, SEQ ID NO: 58, SEQ ID NO: 59, SEQ ID NO: 60, SEQ ID NO: 61, SEQ ID NO: 62, SEQ ID NO: 63, SEQ ID NO: 64, SEQ ID NO: 65, SEQ ID NO: 66, SEQ ID NO: 67, SEQ ID NO: 68, SEQ ID NO: 69, SEQ ID NO: 70, SEQ ID NO: 71, SEQ ID NO: 72, SEQ ID NO: 73, SEQ ID NO: 74, SEQ ID NO: 75, SEQ ID NO: 76, SEQ ID NO: 77, SEQ ID NO: 78, SEQ ID NO: 79, or SEQ ID NO: 80.

[0221] In some examples of any of the ABPCs described herein, the first antigen-binding domain includes a heavy chain variable domain comprising SEQ ID NO: 93, and a light chain variable domain comprising SEQ ID NO: 2, SEQ ID NO: 54, SEQ ID NO: 55, SEQ ID NO: 56, SEQ ID NO: 57, SEQ ID NO: 58, SEQ ID NO: 59, SEQ ID NO: 60, SEQ ID NO: 61, SEQ ID NO: 62, SEQ ID NO: 63, SEQ ID NO: 64, SEQ ID NO: 65, SEQ ID NO: 66, SEQ ID NO: 67, SEQ ID NO: 68, SEQ ID NO: 69, SEQ ID NO: 70, SEQ ID NO: 71, SEQ ID NO: 72, SEQ ID NO: 73, SEQ ID NO: 74, SEQ ID NO: 75, SEQ ID NO: 76, SEQ ID NO: 77, SEQ ID NO: 78, SEQ ID NO: 79, or SEQ ID NO: 80.

[0222] In some examples of any of the ABPCs described herein, the first antigen-binding domain includes a heavy chain variable domain comprising SEQ ID NO: 95, and a light chain variable domain comprising SEQ ID NO: 2, SEQ ID NO: 54, SEQ ID NO: 55, SEQ ID NO: 56, SEQ ID NO: 57, SEQ ID NO: 58, SEQ ID NO: 59, SEQ ID NO: 60, SEQ ID NO: 61, SEQ ID NO: 62, SEQ ID NO: 63, SEQ ID NO: 64, SEQ ID NO: 65, SEQ ID NO: 66, SEQ ID NO: 67, SEQ ID NO: 68, SEQ ID NO: 69, SEQ ID NO: 70, SEQ ID NO: 71, SEQ ID NO: 72, SEQ ID NO: 73, SEQ ID NO: 74, SEQ ID NO: 75, SEQ ID NO: 76, SEQ ID NO: 77, SEQ ID NO: 78, SEQ ID NO: 79, or SEQ ID NO: 80.

[0223] In some examples of any of the ABPCs described herein, the first antigen-binding domain includes a heavy chain variable domain comprising SEQ ID NO: 96, and a light chain variable domain comprising SEQ ID NO: 2, SEQ ID NO: 54, SEQ ID NO: 55, SEQ ID NO: 56, SEQ ID NO: 57, SEQ ID NO: 58, SEQ ID NO: 59, SEQ ID NO: 60, SEQ ID NO: 61, SEQ ID NO: 62, SEQ ID NO: 63, SEQ ID NO: 64, SEQ ID NO: 65, SEQ ID NO: 66, SEQ ID NO: 67, SEQ ID NO: 68, SEQ ID NO: 69, SEQ ID NO: 70, SEQ ID NO: 71, SEQ ID NO: 72, SEQ ID NO: 73, SEQ ID NO: 74, SEQ ID NO: 75, SEQ ID NO: 76, SEQ ID NO: 77, SEQ ID NO: 78, SEQ ID NO: 79, or SEQ ID NO: 80.

[0224] In some examples of any of the ABPCs described herein, the first antigen-binding domain includes a heavy chain variable domain comprising SEQ ID NO: 97, and a light chain variable domain comprising SEQ ID NO: 2, SEQ ID NO: 54, SEQ ID NO: 55, SEQ ID NO: 56, SEQ ID NO: 57, SEQ ID NO: 58, SEQ ID NO: 59, SEQ ID NO: 60, SEQ ID NO: 61, SEQ ID NO: 62, SEQ ID NO: 63, SEQ ID NO: 64, SEQ ID NO: 65, SEQ ID NO: 66, SEQ ID NO: 67, SEQ ID NO: 68, SEQ ID NO: 69, SEQ ID NO: 70, SEQ ID NO: 71, SEQ ID NO: 72, SEQ ID NO: 73, SEQ ID NO: 74, SEQ ID NO: 75, SEQ ID NO: 76, SEQ ID NO: 77, SEQ ID NO: 78, SEQ ID NO: 79, or SEQ ID NO: 80.

[0225] In some examples of any of the ABPCs described herein, the first antigen-binding domain includes a heavy chain variable domain comprising SEQ ID NO: 98, and a light chain variable domain comprising SEQ ID NO: 2, SEQ ID NO: 54, SEQ ID NO: 55, SEQ ID NO: 56, SEQ ID NO: 57, SEQ ID NO: 58, SEQ ID NO: 59, SEQ ID NO: 60, SEQ ID NO: 61, SEQ ID NO: 62, SEQ ID NO: 63, SEQ ID NO: 64, SEQ ID NO: 65, SEQ ID NO: 66, SEQ ID NO: 67, SEQ ID NO: 68, SEQ ID NO: 69, SEQ ID NO: 70, SEQ ID NO: 71, SEQ ID NO: 72, SEQ ID NO: 73, SEQ ID NO: 74, SEQ ID NO: 75, SEQ ID NO: 76, SEQ ID NO: 77, SEQ ID NO: 78, SEQ ID NO: 79, or SEQ ID NO: 80. In some examples of any of the ABPCs described herein, the first antigen-binding domain includes a light chain variable domain comprising SEQ ID NO: 99, SEQ ID NO: 100, SEQ ID NO: 101, SEQ ID NO: 102, SEQ ID NO: 103, SEQ ID NO: 104, SEQ ID NO: 105, SEQ ID NO: 106, SEQ ID NO: 107, SEQ ID NO: 108, SEQ ID NO: 109, SEQ ID NO: 110, SEQ ID NO: 111, SEQ ID NO: 112, SEQ ID NO: 113, SEQ ID NO: 114, SEQ ID NO: 115, SEQ ID NO: 116, SEQ ID NO: 117, or SEQ ID NO: 118.

[0226] In some examples of any of the ABPCs described herein, the first antigen-binding domain includes a heavy chain variable domain comprising SEQ ID NO: 1, SEQ ID NO: 13, SEQ ID NO: 14, SEQ ID NO: 15, SEQ ID NO: 16, SEQ ID NO: 17, SEQ ID NO: 18, SEQ ID NO: 19, SEQ ID NO: 20, SEQ ID NO: 21, SEQ ID NO: 22, SEQ ID NO: 23, SEQ ID NO: 24, SEQ ID NO: 25, SEQ ID NO: 26, SEQ ID NO: 27, SEQ ID NO: 28, SEQ ID NO: 29, SEQ ID NO: 30, SEQ ID NO: 31, SEQ ID NO: 32, SEQ ID NO: 33, SEQ ID NO: 34, SEQ ID NO: 35, SEQ ID NO: 36, SEQ ID NO: 37, SEQ ID NO: 38, SEQ ID NO: 39, SEQ ID NO: 40, SEQ ID NO: 41, SEQ ID NO: 42, SEQ ID NO: 43, SEQ ID NO: 44, SEQ ID NO: 45, SEQ ID NO: 46, SEQ ID NO: 47, SEQ ID NO: 48, SEQ ID NO: 49, SEQ ID NO: 50, SEQ ID NO: 51, SEQ ID NO: 52, SEQ ID NO: 53, SEQ ID NO: 81, SEQ ID NO: 92, SEQ ID NO: 93, SEQ ID NO: 82, SEQ ID NO: 83, SEQ ID NO: 84, SEQ ID NO: 85, SEQ ID NO: 86, SEQ ID NO: 87, SEQ ID NO: 95, SEQ ID NO: 96, SEQ ID NO: 97, SEQ ID NO: 98, SEQ ID NO: 88, SEQ ID NO: 89, SEQ ID NO: 90, SEQ ID NO: 91, SEQ ID NO: 92, SEQ ID NO: 93, SEQ ID NO: 94, SEQ ID NO: 95, SEQ ID NO: 96, SEQ ID NO: 97, or SEQ ID NO: 98.

[0227] In some examples of any of the ABPCs described herein, the first antigen-binding domain includes a light chain variable domain comprising SEQ ID NO: 99, and a heavy chain variable domain comprising SEQ ID NO: 1, SEQ ID NO: 13, SEQ ID NO: 14, SEQ ID NO: 15, SEQ ID NO: 16, SEQ ID NO: 17, SEQ ID NO: 18, SEQ ID NO: 19, SEQ ID NO: 20, SEQ ID NO: 21, SEQ ID NO: 22, SEQ ID NO: 23, SEQ ID NO: 24, SEQ ID NO: 25, SEQ ID NO: 26, SEQ ID NO: 27, SEQ ID NO: 28, SEQ ID NO: 29, SEQ ID NO: 30, SEQ ID NO: 31, SEQ ID NO: 32, SEQ ID NO: 33, SEQ ID NO: 34, SEQ ID NO: 35, SEQ ID NO: 36, SEQ ID NO: 37, SEQ ID NO: 38, SEQ ID NO: 39, SEQ ID NO: 40, SEQ ID NO: 41, SEQ ID NO: 42, SEQ ID NO: 43, SEQ ID NO: 44, SEQ ID NO: 45, SEQ ID NO: 46, SEQ ID NO: 47, SEQ ID NO: 48, SEQ ID NO: 49, SEQ ID NO: 50, SEQ ID NO: 51, SEQ ID NO: 52, SEQ ID NO: 53, SEQ ID NO: 81, SEQ ID NO: 92, SEQ ID NO: 93, SEQ ID NO: 82, SEQ ID NO: 83, SEQ ID NO: 84, SEQ ID NO: 85, SEQ ID NO: 86, SEQ ID NO: 87, SEQ ID NO: 95, SEQ ID NO: 96, SEQ ID NO: 97, SEQ ID NO: 98, SEQ ID NO: 88, SEQ ID NO: 89, SEQ ID NO: 90, SEQ ID NO: 91, SEQ ID NO: 92, SEQ ID NO: 93, SEQ ID NO: 94, SEQ ID NO: 95, SEQ ID NO: 96, SEQ ID NO: 97, or SEQ ID NO: 98.

[0228] In some examples of any of the ABPCs described herein, the first antigen-binding domain includes a light chain variable domain comprising SEQ ID NO: 100, and a heavy chain variable domain comprising SEQ ID NO: 1, SEQ ID NO: 13, SEQ ID NO: 14, SEQ ID NO: 15, SEQ ID NO: 16, SEQ ID NO: 17, SEQ ID NO: 18, SEQ ID NO: 19, SEQ ID NO: 20, SEQ ID NO: 21, SEQ ID NO: 22, SEQ ID NO: 23, SEQ ID NO: 24, SEQ ID NO: 25, SEQ ID NO: 26, SEQ ID NO: 27, SEQ ID NO: 28, SEQ ID NO: 29, SEQ ID NO: 30, SEQ ID NO: 31, SEQ ID NO: 32, SEQ ID NO: 33, SEQ ID NO: 34, SEQ ID NO: 35, SEQ ID NO: 36, SEQ ID NO: 37, SEQ ID NO: 38, SEQ ID NO: 39, SEQ ID NO: 40, SEQ ID NO: 41, SEQ ID NO: 42, SEQ ID NO: 43, SEQ ID NO: 44, SEQ ID NO: 45, SEQ ID NO: 46, SEQ ID NO: 47, SEQ ID NO: 48, SEQ ID NO: 49, SEQ ID NO: 50, SEQ ID NO: 51, SEQ ID NO: 52, SEQ ID NO: 53, SEQ ID NO: 81, SEQ ID NO: 92, SEQ ID NO: 93, SEQ ID NO: 82, SEQ ID NO: 83, SEQ ID NO: 84, SEQ ID NO: 85, SEQ ID NO: 86, SEQ ID NO: 87, SEQ ID NO: 95, SEQ ID NO: 96, SEQ ID NO: 97, SEQ ID NO: 98, SEQ ID NO: 88, SEQ ID NO: 89, SEQ ID NO: 90, SEQ ID NO: 91, SEQ ID NO: 92, SEQ ID NO: 93, SEQ ID NO: 94, SEQ ID NO: 95, SEQ ID NO: 96, SEQ ID NO: 97, or SEQ ID NO: 98.

[0229] In some examples of any of the ABPCs described herein, the first antigen-binding domain includes a light chain variable domain comprising SEQ ID NO: 101, and a heavy chain variable domain comprising SEQ ID NO: 1, SEQ ID NO: 13, SEQ ID NO: 14, SEQ ID NO: 15, SEQ ID NO: 16, SEQ ID NO: 17, SEQ ID NO: 18, SEQ ID NO: 19, SEQ ID NO: 20, SEQ ID NO: 21, SEQ ID NO: 22, SEQ ID NO: 23, SEQ ID NO: 24, SEQ ID NO: 25, SEQ ID NO: 26, SEQ ID NO: 27, SEQ ID NO: 28, SEQ ID NO: 29, SEQ ID NO: 30, SEQ ID NO: 31, SEQ ID NO: 32, SEQ ID NO: 33, SEQ ID NO: 34, SEQ ID NO: 35, SEQ ID NO: 36, SEQ ID NO: 37, SEQ ID NO: 38, SEQ ID NO: 39, SEQ ID NO: 40, SEQ ID NO: 41, SEQ ID NO: 42, SEQ ID NO: 43, SEQ ID NO: 44, SEQ ID NO: 45, SEQ ID NO: 46, SEQ ID NO: 47, SEQ ID NO: 48, SEQ ID NO: 49, SEQ ID NO: 50, SEQ ID NO: 51, SEQ ID NO: 52, SEQ ID NO: 53, SEQ ID NO: 81, SEQ ID NO: 92, SEQ ID NO: 93, SEQ ID NO: 82, SEQ ID NO: 83, SEQ ID NO: 84, SEQ ID NO: 85, SEQ ID NO: 86, SEQ ID NO: 87, SEQ ID NO: 95, SEQ ID NO: 96, SEQ ID NO: 97, SEQ ID NO: 98, SEQ ID NO: 88, SEQ ID NO: 89, SEQ ID NO: 90, SEQ ID NO: 91, SEQ ID NO: 92, SEQ ID NO: 93, SEQ ID NO: 94, SEQ ID NO: 95, SEQ ID NO: 96, SEQ ID NO: 97, or SEQ ID NO: 98.

[0230] In some examples of any of the ABPCs described herein, the first antigen-binding domain includes a light chain variable domain comprising SEQ ID NO: 102, and a heavy chain variable domain comprising SEQ ID NO: 1, SEQ ID NO: 13, SEQ ID NO: 14, SEQ ID NO: 15, SEQ ID NO: 16, SEQ ID NO: 17, SEQ ID NO: 18, SEQ ID NO: 19, SEQ ID NO: 20, SEQ ID NO: 21, SEQ ID NO: 22, SEQ ID NO: 23, SEQ ID NO: 24, SEQ ID NO: 25, SEQ ID NO: 26, SEQ ID NO: 27, SEQ ID NO: 28, SEQ ID NO: 29, SEQ ID NO: 30, SEQ ID NO: 31, SEQ ID NO: 32, SEQ ID NO: 33, SEQ ID NO: 34, SEQ ID NO: 35, SEQ ID NO: 36, SEQ ID NO: 37, SEQ ID NO: 38, SEQ ID NO: 39, SEQ ID NO: 40, SEQ ID NO: 41, SEQ ID NO: 42, SEQ ID NO: 43, SEQ ID NO: 44, SEQ ID NO: 45, SEQ ID NO: 46, SEQ ID NO: 47, SEQ ID NO: 48, SEQ ID NO: 49, SEQ ID NO: 50, SEQ ID NO: 51, SEQ ID NO: 52, SEQ ID NO: 53, SEQ ID NO: 81, SEQ ID NO: 92, SEQ ID NO: 93, SEQ ID NO: 82, SEQ ID NO: 83, SEQ ID NO: 84, SEQ ID NO: 85, SEQ ID NO: 86, SEQ ID NO: 87, SEQ ID NO: 95, SEQ ID NO: 96, SEQ ID NO: 97, SEQ ID NO: 98, SEQ ID NO: 88, SEQ ID NO: 89, SEQ ID NO: 90, SEQ ID NO: 91, SEQ ID NO: 92, SEQ ID NO: 93, SEQ ID NO: 94, SEQ ID NO: 95, SEQ ID NO: 96, SEQ ID NO: 97, or SEQ ID NO: 98.

[0231] In some examples of any of the ABPCs described herein, the first antigen-binding domain includes a light chain variable domain comprising SEQ ID NO: 103, and a heavy chain variable domain comprising SEQ ID NO: 1, SEQ ID NO: 13, SEQ ID NO: 14, SEQ ID NO: 15, SEQ ID NO: 16, SEQ ID NO: 17, SEQ ID NO: 18, SEQ ID NO: 19, SEQ ID NO: 20, SEQ ID NO: 21, SEQ ID NO: 22, SEQ ID NO: 23, SEQ ID NO: 24, SEQ ID NO: 25, SEQ ID NO: 26, SEQ ID NO: 27, SEQ ID NO: 28, SEQ ID NO: 29, SEQ ID NO: 30, SEQ ID NO: 31, SEQ ID NO: 32, SEQ ID NO: 33, SEQ ID NO: 34, SEQ ID NO: 35, SEQ ID NO: 36, SEQ ID NO: 37, SEQ ID NO: 38, SEQ ID NO: 39, SEQ ID NO: 40, SEQ ID NO: 41, SEQ ID NO: 42, SEQ ID NO: 43, SEQ ID NO: 44, SEQ ID NO: 45, SEQ ID NO: 46, SEQ ID NO: 47, SEQ ID NO: 48, SEQ ID NO: 49, SEQ ID NO: 50, SEQ ID NO: 51, SEQ ID NO: 52, SEQ ID NO: 53, SEQ ID NO: 81, SEQ ID NO: 92, SEQ ID NO: 93, SEQ ID NO: 82, SEQ ID NO: 83, SEQ ID NO: 84, SEQ ID NO: 85, SEQ ID NO: 86, SEQ ID NO: 87, SEQ ID NO: 95, SEQ ID NO: 96, SEQ ID NO: 97, SEQ ID NO: 98, SEQ ID NO: 88, SEQ ID NO: 89, SEQ ID NO: 90, SEQ ID NO: 91, SEQ ID NO: 92, SEQ ID NO: 93, SEQ ID NO: 94, SEQ ID NO: 95, SEQ ID NO: 96, SEQ ID NO: 97, or SEQ ID NO: 98.

[0232] In some examples of any of the ABPCs described herein, the first antigen-binding domain includes a light chain variable domain comprising SEQ ID NO: 104, and a heavy chain variable domain comprising SEQ ID NO: 1, SEQ ID NO: 13, SEQ ID NO: 14, SEQ ID NO: 15, SEQ ID NO: 16, SEQ ID NO: 17, SEQ ID NO: 18, SEQ ID NO: 19, SEQ ID NO: 20, SEQ ID NO: 21, SEQ ID NO: 22, SEQ ID NO: 23, SEQ ID NO: 24, SEQ ID NO: 25, SEQ ID NO: 26, SEQ ID NO: 27, SEQ ID NO: 28, SEQ ID NO: 29, SEQ ID NO: 30, SEQ ID NO: 31, SEQ ID NO: 32, SEQ ID NO: 33, SEQ ID NO: 34, SEQ ID NO: 35, SEQ ID NO: 36, SEQ ID NO: 37, SEQ ID NO: 38, SEQ ID NO: 39, SEQ ID NO: 40, SEQ ID NO: 41, SEQ ID NO: 42, SEQ ID NO: 43, SEQ ID NO: 44, SEQ ID NO: 45, SEQ ID NO: 46, SEQ ID NO: 47, SEQ ID NO: 48, SEQ ID NO: 49, SEQ ID NO: 50, SEQ ID NO: 51, SEQ ID NO: 52, SEQ ID NO: 53, SEQ ID NO: 81, SEQ ID NO: 92, SEQ ID NO: 93, SEQ ID NO: 82, SEQ ID NO: 83, SEQ ID NO: 84, SEQ ID NO: 85, SEQ ID NO: 86, SEQ ID NO: 87, SEQ ID NO: 95, SEQ ID NO: 96, SEQ ID NO: 97, SEQ ID NO: 98, SEQ ID NO: 88, SEQ ID NO: 89, SEQ ID NO: 90, SEQ ID NO: 91, SEQ ID NO: 92, SEQ ID NO: 93, SEQ ID NO: 94, SEQ ID NO: 95, SEQ ID NO: 96, SEQ ID NO: 97, or SEQ ID NO: 98.

[0233] In some examples of any of the ABPCs described herein, the first antigen-binding domain includes a light chain variable domain comprising SEQ ID NO: 105, and a heavy chain variable domain comprising SEQ ID NO: 1, SEQ ID NO: 13, SEQ ID NO: 14, SEQ ID NO: 15, SEQ ID NO: 16, SEQ ID NO: 17, SEQ ID NO: 18, SEQ ID NO: 19, SEQ ID NO: 20, SEQ ID NO: 21, SEQ ID NO: 22, SEQ ID NO: 23, SEQ ID NO: 24, SEQ ID NO: 25, SEQ ID NO: 26, SEQ ID NO: 27, SEQ ID NO: 28, SEQ ID NO: 29, SEQ ID NO: 30, SEQ ID NO: 31, SEQ ID NO: 32, SEQ ID NO: 33, SEQ ID NO: 34, SEQ ID NO: 35, SEQ ID NO: 36, SEQ ID NO: 37, SEQ ID NO: 38, SEQ ID NO: 39, SEQ ID NO: 40, SEQ ID NO: 41, SEQ ID NO: 42, SEQ ID NO: 43, SEQ ID NO: 44, SEQ ID NO: 45, SEQ ID NO: 46, SEQ ID NO: 47, SEQ ID NO: 48, SEQ ID NO: 49, SEQ ID NO: 50, SEQ ID NO: 51, SEQ ID NO: 52, SEQ ID NO: 53, SEQ ID NO: 81, SEQ ID NO: 92, SEQ ID NO: 93, SEQ ID NO: 82, SEQ ID NO: 83, SEQ ID NO: 84, SEQ ID NO: 85, SEQ ID NO: 86, SEQ ID NO: 87, SEQ ID NO: 95, SEQ ID NO: 96, SEQ ID NO: 97, SEQ ID NO: 98, SEQ ID NO: 88, SEQ ID NO: 89, SEQ ID NO: 90, SEQ ID NO: 91, SEQ ID NO: 92, SEQ ID NO: 93, SEQ ID NO: 94, SEQ ID NO: 95, SEQ ID NO: 96, SEQ ID NO: 97, or SEQ ID NO: 98.

[0234] In some examples of any of the ABPCs described herein, the first antigen-binding domain includes a light chain variable domain comprising SEQ ID NO: 106, and a heavy chain variable domain comprising SEQ ID NO: 1, SEQ ID NO: 13, SEQ ID NO: 14, SEQ ID NO: 15, SEQ ID NO: 16, SEQ ID NO: 17, SEQ ID NO: 18, SEQ ID NO: 19, SEQ ID NO: 20, SEQ ID NO: 21, SEQ ID NO: 22, SEQ ID NO: 23, SEQ ID NO: 24, SEQ ID NO: 25, SEQ ID NO: 26, SEQ ID NO: 27, SEQ ID NO: 28, SEQ ID NO: 29, SEQ ID NO: 30, SEQ ID NO: 31, SEQ ID NO: 32, SEQ ID NO: 33, SEQ ID NO: 34, SEQ ID NO: 35, SEQ ID NO: 36, SEQ ID NO: 37, SEQ ID NO: 38, SEQ ID NO: 39, SEQ ID NO: 40, SEQ ID NO: 41, SEQ ID NO: 42, SEQ ID NO: 43, SEQ ID NO: 44, SEQ ID NO: 45, SEQ ID NO: 46, SEQ ID NO: 47, SEQ ID NO: 48, SEQ ID NO: 49, SEQ ID NO: 50, SEQ ID NO: 51, SEQ ID NO: 52, SEQ ID NO: 53, SEQ ID NO: 81, SEQ ID NO: 92, SEQ ID NO: 93, SEQ ID NO: 82, SEQ ID NO: 83, SEQ ID NO: 84, SEQ ID NO: 85, SEQ ID NO: 86, SEQ ID NO: 87, SEQ ID NO: 95, SEQ ID NO: 96, SEQ ID NO: 97, SEQ ID NO: 98, SEQ ID NO: 88, SEQ ID NO: 89, SEQ ID NO: 90, SEQ ID NO: 91, SEQ ID NO: 92, SEQ ID NO: 93, SEQ ID NO: 94, SEQ ID NO: 95, SEQ ID NO: 96, SEQ ID NO: 97, or SEQ ID NO: 98.

[0235] In some examples of any of the ABPCs described herein, the first antigen-binding domain includes a light chain variable domain comprising SEQ ID NO: 107, and a heavy chain variable domain comprising SEQ ID NO: 1, SEQ ID NO: 13, SEQ ID NO: 14, SEQ ID NO: 15, SEQ ID NO: 16, SEQ ID NO: 17, SEQ ID NO: 18, SEQ ID NO: 19, SEQ ID NO: 20, SEQ ID NO: 21, SEQ ID NO: 22, SEQ ID NO: 23, SEQ ID NO: 24, SEQ ID NO: 25, SEQ ID NO: 26, SEQ ID NO: 27, SEQ ID NO: 28, SEQ ID NO: 29, SEQ ID NO: 30, SEQ ID NO: 31, SEQ ID NO: 32, SEQ ID NO: 33, SEQ ID NO: 34, SEQ ID NO: 35, SEQ ID NO: 36, SEQ ID NO: 37, SEQ ID NO: 38, SEQ ID NO: 39, SEQ ID NO: 40, SEQ ID NO: 41, SEQ ID NO: 42, SEQ ID NO: 43, SEQ ID NO: 44, SEQ ID NO: 45, SEQ ID NO: 46, SEQ ID NO: 47, SEQ ID NO: 48, SEQ ID NO: 49, SEQ ID NO: 50, SEQ ID NO: 51, SEQ ID NO: 52, SEQ ID NO: 53, SEQ ID NO: 81, SEQ ID NO: 92, SEQ ID NO: 93, SEQ ID NO: 82, SEQ ID NO: 83, SEQ ID NO: 84, SEQ ID NO: 85, SEQ ID NO: 86, SEQ ID NO: 87, SEQ ID NO: 95, SEQ ID NO: 96, SEQ ID NO: 97, SEQ ID NO: 98, SEQ ID NO: 88, SEQ ID NO: 89, SEQ ID NO: 90, SEQ ID NO: 91, SEQ ID NO: 92, SEQ ID NO: 93, SEQ ID NO: 94, SEQ ID NO: 95, SEQ ID NO: 96, SEQ ID NO: 97, or SEQ ID NO: 98.

[0236] In some examples of any of the ABPCs described herein, the first antigen-binding domain includes a light chain variable domain comprising SEQ ID NO: 108, and a heavy chain variable domain comprising SEQ ID NO: 1, SEQ ID NO: 13, SEQ ID NO: 14, SEQ ID NO: 15, SEQ ID NO: 16, SEQ ID NO: 17, SEQ ID NO: 18, SEQ ID NO: 19, SEQ ID NO: 20, SEQ ID NO: 21, SEQ ID NO: 22, SEQ ID NO: 23, SEQ ID NO: 24, SEQ ID NO: 25, SEQ ID NO: 26, SEQ ID NO: 27, SEQ ID NO: 28, SEQ ID NO: 29, SEQ ID NO: 30, SEQ ID NO: 31, SEQ ID NO: 32, SEQ ID NO: 33, SEQ ID NO: 34, SEQ ID NO: 35, SEQ ID NO: 36, SEQ ID NO: 37, SEQ ID NO: 38, SEQ ID NO: 39, SEQ ID NO: 40, SEQ ID NO: 41, SEQ ID NO: 42, SEQ ID NO: 43, SEQ ID NO: 44, SEQ ID NO: 45, SEQ ID NO: 46, SEQ ID NO: 47, SEQ ID NO: 48, SEQ ID NO: 49, SEQ ID NO: 50, SEQ ID NO: 51, SEQ ID NO: 52, SEQ ID NO: 53, SEQ ID NO: 81, SEQ ID NO: 92, SEQ ID NO: 93, SEQ ID NO: 82, SEQ ID NO: 83, SEQ ID NO: 84, SEQ ID NO: 85, SEQ ID NO: 86, SEQ ID NO: 87, SEQ ID NO: 95, SEQ ID NO: 96, SEQ ID NO: 97, SEQ ID NO: 98, SEQ ID NO: 88, SEQ ID NO: 89, SEQ ID NO: 90, SEQ ID NO: 91, SEQ ID NO: 92, SEQ ID NO: 93, SEQ ID NO: 94, SEQ ID NO: 95, SEQ ID NO: 96, SEQ ID NO: 97, or SEQ ID NO: 98.

[0237] In some examples of any of the ABPCs described herein, the first antigen-binding domain includes a light chain variable domain comprising SEQ ID NO: 109, and a heavy chain variable domain comprising SEQ ID NO: 1, SEQ ID NO: 13, SEQ ID NO: 14, SEQ ID NO: 15, SEQ ID NO: 16, SEQ ID NO: 17, SEQ ID NO: 18, SEQ ID NO: 19, SEQ ID NO: 20, SEQ ID NO: 21, SEQ ID NO: 22, SEQ ID NO: 23, SEQ ID NO: 24, SEQ ID NO: 25, SEQ ID NO: 26, SEQ ID NO: 27, SEQ ID NO: 28, SEQ ID NO: 29, SEQ ID NO: 30, SEQ ID NO: 31, SEQ ID NO: 32, SEQ ID NO: 33, SEQ ID NO: 34, SEQ ID NO: 35, SEQ ID NO: 36, SEQ ID NO: 37, SEQ ID NO: 38, SEQ ID NO: 39, SEQ ID NO: 40, SEQ ID NO: 41, SEQ ID NO: 42, SEQ ID NO: 43, SEQ ID NO: 44, SEQ ID NO: 45, SEQ ID NO: 46, SEQ ID NO: 47, SEQ ID NO: 48, SEQ ID NO: 49, SEQ ID NO: 50, SEQ ID NO: 51, SEQ ID NO: 52, SEQ ID NO: 53, SEQ ID NO: 81, SEQ ID NO: 92, SEQ ID NO: 93, SEQ ID NO: 82, SEQ ID NO: 83, SEQ ID NO: 84, SEQ ID NO: 85, SEQ ID NO: 86, SEQ ID NO: 87, SEQ ID NO: 95, SEQ ID NO: 96, SEQ ID NO: 97, SEQ ID NO: 98, SEQ ID NO: 88, SEQ ID NO: 89, SEQ ID NO: 90, SEQ ID NO: 91, SEQ ID NO: 92, SEQ ID NO: 93, SEQ ID NO: 94, SEQ ID NO: 95, SEQ ID NO: 96, SEQ ID NO: 97, or SEQ ID NO: 98.

[0238] In some examples of any of the ABPCs described herein, the first antigen-binding domain includes a light chain variable domain comprising SEQ ID NO: 110, and a heavy chain variable domain comprising SEQ ID NO: 1, SEQ ID NO: 13, SEQ ID NO: 14, SEQ ID NO: 15, SEQ ID NO: 16, SEQ ID NO: 17, SEQ ID NO: 18, SEQ ID NO: 19, SEQ ID NO: 20, SEQ ID NO: 21, SEQ ID NO: 22, SEQ ID NO: 23, SEQ ID NO: 24, SEQ ID NO: 25, SEQ ID NO: 26, SEQ ID NO: 27, SEQ ID NO: 28, SEQ ID NO: 29, SEQ ID NO: 30, SEQ ID NO: 31, SEQ ID NO: 32, SEQ ID NO: 33, SEQ ID NO: 34, SEQ ID NO: 35, SEQ ID NO: 36, SEQ ID NO: 37, SEQ ID NO: 38, SEQ ID NO: 39, SEQ ID NO: 40, SEQ ID NO: 41, SEQ ID NO: 42, SEQ ID NO: 43, SEQ ID NO: 44, SEQ ID NO: 45, SEQ ID NO: 46, SEQ ID NO: 47, SEQ ID NO: 48, SEQ ID NO: 49, SEQ ID NO: 50, SEQ ID NO: 51, SEQ ID NO: 52, SEQ ID NO: 53, SEQ ID NO: 81, SEQ ID NO: 92, SEQ ID NO: 93, SEQ ID NO: 82, SEQ ID NO: 83, SEQ ID NO: 84, SEQ ID NO: 85, SEQ ID NO: 86, SEQ ID NO: 87, SEQ ID NO: 95, SEQ ID NO: 96, SEQ ID NO: 97, SEQ ID NO: 98, SEQ ID NO: 88, SEQ ID NO: 89, SEQ ID NO: 90, SEQ ID NO: 91, SEQ ID NO: 92, SEQ ID NO: 93, SEQ ID NO: 94, SEQ ID NO: 95, SEQ ID NO: 96, SEQ ID NO: 97, or SEQ ID NO: 98.

[0239] In some examples of any of the ABPCs described herein, the first antigen-binding domain includes a light chain variable domain comprising SEQ ID NO: 111, and a heavy chain variable domain comprising SEQ ID NO: 1, SEQ ID NO: 13, SEQ ID NO: 14, SEQ ID NO: 15, SEQ ID NO: 16, SEQ ID NO: 17, SEQ ID NO: 18, SEQ ID NO: 19, SEQ ID NO: 20, SEQ ID NO: 21, SEQ ID NO: 22, SEQ ID NO: 23, SEQ ID NO: 24, SEQ ID NO: 25, SEQ ID NO: 26, SEQ ID NO: 27, SEQ ID NO: 28, SEQ ID NO: 29, SEQ ID NO: 30, SEQ ID NO: 31, SEQ ID NO: 32, SEQ ID NO: 33, SEQ ID NO: 34, SEQ ID NO: 35, SEQ ID NO: 36, SEQ ID NO: 37, SEQ ID NO: 38, SEQ ID NO: 39, SEQ ID NO: 40, SEQ ID NO: 41, SEQ ID NO: 42, SEQ ID NO: 43, SEQ ID NO: 44, SEQ ID NO: 45, SEQ ID NO: 46, SEQ ID NO: 47, SEQ ID NO: 48, SEQ ID NO: 49, SEQ ID NO: 50, SEQ ID NO: 51, SEQ ID NO: 52, SEQ ID NO: 53, SEQ ID NO: 81, SEQ ID NO: 92, SEQ ID NO: 93, SEQ ID NO: 82, SEQ ID NO: 83, SEQ ID NO: 84, SEQ ID NO: 85, SEQ ID NO: 86, SEQ ID NO: 87, SEQ ID NO: 95, SEQ ID NO: 96, SEQ ID NO: 97, SEQ ID NO: 98, SEQ ID NO: 88, SEQ ID NO: 89, SEQ ID NO: 90, SEQ ID NO: 91, SEQ ID NO: 92, SEQ ID NO: 93, SEQ ID NO: 94, SEQ ID NO: 95, SEQ ID NO: 96, SEQ ID NO: 97, or SEQ ID NO: 98.

[0240] In some examples of any of the ABPCs described herein, the first antigen-binding domain includes a light chain variable domain comprising SEQ ID NO: 112, and a heavy chain variable domain comprising SEQ ID NO: 1, SEQ ID NO: 13, SEQ ID NO: 14, SEQ ID NO: 15, SEQ ID NO: 16, SEQ ID NO: 17, SEQ ID NO: 18, SEQ ID NO: 19, SEQ ID NO: 20, SEQ ID NO: 21, SEQ ID NO: 22, SEQ ID NO: 23, SEQ ID NO: 24, SEQ ID NO: 25, SEQ ID NO: 26, SEQ ID NO: 27, SEQ ID NO: 28, SEQ ID NO: 29, SEQ ID NO: 30, SEQ ID NO: 31, SEQ ID NO: 32, SEQ ID NO: 33, SEQ ID NO: 34, SEQ ID NO: 35, SEQ ID NO: 36, SEQ ID NO: 37, SEQ ID NO: 38, SEQ ID NO: 39, SEQ ID NO: 40, SEQ ID NO: 41, SEQ ID NO: 42, SEQ ID NO: 43, SEQ ID NO: 44, SEQ ID NO: 45, SEQ ID NO: 46, SEQ ID NO: 47, SEQ ID NO: 48, SEQ ID NO: 49, SEQ ID NO: 50, SEQ ID NO: 51, SEQ ID NO: 52, SEQ ID NO: 53, SEQ ID NO: 81, SEQ ID NO: 92, SEQ ID NO: 93, SEQ ID NO: 82, SEQ ID NO: 83, SEQ ID NO: 84, SEQ ID NO: 85, SEQ ID NO: 86, SEQ ID NO: 87, SEQ ID NO: 95, SEQ ID NO: 96, SEQ ID NO: 97, SEQ ID NO: 98, SEQ ID NO: 88, SEQ ID NO: 89, SEQ ID NO: 90, SEQ ID NO: 91, SEQ ID NO: 92, SEQ ID NO: 93, SEQ ID NO: 94, SEQ ID NO: 95, SEQ ID NO: 96, SEQ ID NO: 97, or SEQ ID NO: 98.

[0241] In some examples of any of the ABPCs described herein, the first antigen-binding domain includes a light chain variable domain comprising SEQ ID NO: 113, and a heavy chain variable domain comprising SEQ ID NO: 1, SEQ ID NO: 13, SEQ ID NO: 14, SEQ ID NO: 15, SEQ ID NO: 16, SEQ ID NO: 17, SEQ ID NO: 18, SEQ ID NO: 19, SEQ ID NO: 20, SEQ ID NO: 21, SEQ ID NO: 22, SEQ ID NO: 23, SEQ ID NO: 24, SEQ ID NO: 25, SEQ ID NO: 26, SEQ ID NO: 27, SEQ ID NO: 28, SEQ ID NO: 29, SEQ ID NO: 30, SEQ ID NO: 31, SEQ ID NO: 32, SEQ ID NO: 33, SEQ ID NO: 34, SEQ ID NO: 35, SEQ ID NO: 36, SEQ ID NO: 37, SEQ ID NO: 38, SEQ ID NO: 39, SEQ ID NO: 40, SEQ ID NO: 41, SEQ ID NO: 42, SEQ ID NO: 43, SEQ ID NO: 44, SEQ ID NO: 45, SEQ ID NO: 46, SEQ ID NO: 47, SEQ ID NO: 48, SEQ ID NO: 49, SEQ ID NO: 50, SEQ ID NO: 51, SEQ ID NO: 52, SEQ ID NO: 53, SEQ ID NO: 81, SEQ ID NO: 92, SEQ ID NO: 93, SEQ ID NO: 82, SEQ ID NO: 83, SEQ ID NO: 84, SEQ ID NO: 85, SEQ ID NO: 86, SEQ ID NO: 87, SEQ ID NO: 95, SEQ ID NO: 96, SEQ ID NO: 97, SEQ ID NO: 98, SEQ ID NO: 88, SEQ ID NO: 89, SEQ ID NO: 90, SEQ ID NO: 91, SEQ ID NO: 92, SEQ ID NO: 93, SEQ ID NO: 94, SEQ ID NO: 95, SEQ ID NO: 96, SEQ ID NO: 97, or SEQ ID NO: 98.

[0242] In some examples of any of the ABPCs described herein, the first antigen-binding domain includes a light chain variable domain comprising SEQ ID NO: 114, and a heavy chain variable domain comprising SEQ ID NO: 1, SEQ ID NO: 13, SEQ ID NO: 14, SEQ ID NO: 15, SEQ ID NO: 16, SEQ ID NO: 17, SEQ ID NO: 18, SEQ ID NO: 19, SEQ ID NO: 20, SEQ ID NO: 21, SEQ ID NO: 22, SEQ ID NO: 23, SEQ ID NO: 24, SEQ ID NO: 25, SEQ ID NO: 26, SEQ ID NO: 27, SEQ ID NO: 28, SEQ ID NO: 29, SEQ ID NO: 30, SEQ ID NO: 31, SEQ ID NO: 32, SEQ ID NO: 33, SEQ ID NO: 34, SEQ ID NO: 35, SEQ ID NO: 36, SEQ ID NO: 37, SEQ ID NO: 38, SEQ ID NO: 39, SEQ ID NO: 40, SEQ ID NO: 41, SEQ ID NO: 42, SEQ ID NO: 43, SEQ ID NO: 44, SEQ ID NO: 45, SEQ ID NO: 46, SEQ ID NO: 47, SEQ ID NO: 48, SEQ ID NO: 49, SEQ ID NO: 50, SEQ ID NO: 51, SEQ ID NO: 52, SEQ ID NO: 53, SEQ ID NO: 81, SEQ ID NO: 92, SEQ ID NO: 93, SEQ ID NO: 82, SEQ ID NO: 83, SEQ ID NO: 84, SEQ ID NO: 85, SEQ ID NO: 86, SEQ ID NO: 87, SEQ ID NO: 95, SEQ ID NO: 96, SEQ ID NO: 97, SEQ ID NO: 98, SEQ ID NO: 88, SEQ ID NO: 89, SEQ ID NO: 90, SEQ ID NO: 91, SEQ ID NO: 92, SEQ ID NO: 93, SEQ ID NO: 94, SEQ ID NO: 95, SEQ ID NO: 96, SEQ ID NO: 97, or SEQ ID NO: 98.

[0243] In some examples of any of the ABPCs described herein, the first antigen-binding domain includes a light chain variable domain comprising SEQ ID NO: 114, and a heavy chain variable domain comprising SEQ ID NO: 1, SEQ ID NO: 13, SEQ ID NO: 14, SEQ ID NO: 15, SEQ ID NO: 16, SEQ ID NO: 17, SEQ ID NO: 18, SEQ ID NO: 19, SEQ ID NO: 20, SEQ ID NO: 21, SEQ ID NO: 22, SEQ ID NO: 23, SEQ ID NO: 24, SEQ ID NO: 25, SEQ ID NO: 26, SEQ ID NO: 27, SEQ ID NO: 28, SEQ ID NO: 29, SEQ ID NO: 30, SEQ ID NO: 31, SEQ ID NO: 32, SEQ ID NO: 33, SEQ ID NO: 34, SEQ ID NO: 35, SEQ ID NO: 36, SEQ ID NO: 37, SEQ ID NO: 38, SEQ ID NO: 39, SEQ ID NO: 40, SEQ ID NO: 41, SEQ ID NO: 42, SEQ ID NO: 43, SEQ ID NO: 44, SEQ ID NO: 45, SEQ ID NO: 46, SEQ ID NO: 47, SEQ ID NO: 48, SEQ ID NO: 49, SEQ ID NO: 50, SEQ ID NO: 51, SEQ ID NO: 52, SEQ ID NO: 53, SEQ ID NO: 81, SEQ ID NO: 92, SEQ ID NO: 93, SEQ ID NO: 82, SEQ ID NO: 83, SEQ ID NO: 84, SEQ ID NO: 85, SEQ ID NO: 86, SEQ ID NO: 87, SEQ ID NO: 95, SEQ ID NO: 96, SEQ ID NO: 97, SEQ ID NO: 98, SEQ ID NO: 88, SEQ ID NO: 89, SEQ ID NO: 90, SEQ ID NO: 91, SEQ ID NO: 92, SEQ ID NO: 93, SEQ ID NO: 94, SEQ ID NO: 95, SEQ ID NO: 96, SEQ ID NO: 97, or SEQ ID NO: 98.

[0244] In some examples of any of the ABPCs described herein, the first antigen-binding domain includes a light chain variable domain comprising SEQ ID NO: 115, and a heavy chain variable domain comprising SEQ ID NO: 1, SEQ ID NO: 13, SEQ ID NO: 14, SEQ ID NO: 15, SEQ ID NO: 16, SEQ ID NO: 17, SEQ ID NO: 18, SEQ ID NO: 19, SEQ ID NO: 20, SEQ ID NO: 21, SEQ ID NO: 22, SEQ ID NO: 23, SEQ ID NO: 24, SEQ ID NO: 25, SEQ ID NO: 26, SEQ ID NO: 27, SEQ ID NO: 28, SEQ ID NO: 29, SEQ ID NO: 30, SEQ ID NO: 31, SEQ ID NO: 32, SEQ ID NO: 33, SEQ ID NO: 34, SEQ ID NO: 35, SEQ ID NO: 36, SEQ ID NO: 37, SEQ ID NO: 38, SEQ ID NO: 39, SEQ ID NO: 40, SEQ ID NO: 41, SEQ ID NO: 42, SEQ ID NO: 43, SEQ ID NO: 44, SEQ ID NO: 45, SEQ ID NO: 46, SEQ ID NO: 47, SEQ ID NO: 48, SEQ ID NO: 49, SEQ ID NO: 50, SEQ ID NO: 51, SEQ ID NO: 52, SEQ ID NO: 53, SEQ ID NO: 81, SEQ ID NO: 92, SEQ ID NO: 93, SEQ ID NO: 82, SEQ ID NO: 83, SEQ ID NO: 84, SEQ ID NO: 85, SEQ ID NO: 86, SEQ ID NO: 87, SEQ ID NO: 95, SEQ ID NO: 96, SEQ ID NO: 97, SEQ ID NO: 98, SEQ ID NO: 88, SEQ ID NO: 89, SEQ ID NO: 90, SEQ ID NO: 91, SEQ ID NO: 92, SEQ ID NO: 93, SEQ ID NO: 94, SEQ ID NO: 95, SEQ ID NO: 96, SEQ ID NO: 97, or SEQ ID NO: 98.

[0245] In some examples of any of the ABPCs described herein, the first antigen-binding domain includes a light chain variable domain comprising SEQ ID NO: 116, and a heavy chain variable domain comprising SEQ ID NO: 1, SEQ ID NO: 13, SEQ ID NO: 14, SEQ ID NO: 15, SEQ ID NO: 16, SEQ ID NO: 17, SEQ ID NO: 18, SEQ ID NO: 19, SEQ ID NO: 20, SEQ ID NO: 21, SEQ ID NO: 22, SEQ ID NO: 23, SEQ ID NO: 24, SEQ ID NO: 25, SEQ ID NO: 26, SEQ ID NO: 27, SEQ ID NO: 28, SEQ ID NO: 29, SEQ ID NO: 30, SEQ ID NO: 31, SEQ ID NO: 32, SEQ ID NO: 33, SEQ ID NO: 34, SEQ ID NO: 35, SEQ ID NO: 36, SEQ ID NO: 37, SEQ ID NO: 38, SEQ ID NO: 39, SEQ ID NO: 40, SEQ ID NO: 41, SEQ ID NO: 42, SEQ ID NO: 43, SEQ ID NO: 44, SEQ ID NO: 45, SEQ ID NO: 46, SEQ ID NO: 47, SEQ ID NO: 48, SEQ ID NO: 49, SEQ ID NO: 50, SEQ ID NO: 51, SEQ ID NO: 52, SEQ ID NO: 53, SEQ ID NO: 81, SEQ ID NO: 92, SEQ ID NO: 93, SEQ ID NO: 82, SEQ ID NO: 83, SEQ ID NO: 84, SEQ ID NO: 85, SEQ ID NO: 86, SEQ ID NO: 87, SEQ ID NO: 95, SEQ ID NO: 96, SEQ ID NO: 97, SEQ ID NO: 98, SEQ ID NO: 88, SEQ ID NO: 89, SEQ ID NO: 90, SEQ ID NO: 91, SEQ ID NO: 92, SEQ ID NO: 93, SEQ ID NO: 94, SEQ ID NO: 95, SEQ ID NO: 96, SEQ ID NO: 97, or SEQ ID NO: 98.

[0246] In some examples of any of the ABPCs described herein, the first antigen-binding domain includes a light chain variable domain comprising SEQ ID NO: 117, and a heavy chain variable domain comprising SEQ ID NO: 1, SEQ ID NO: 13, SEQ ID NO: 14, SEQ ID NO: 15, SEQ ID NO: 16, SEQ ID NO: 17, SEQ ID NO: 18, SEQ ID NO: 19, SEQ ID NO: 20, SEQ ID NO: 21, SEQ ID NO: 22, SEQ ID NO: 23, SEQ ID NO: 24, SEQ ID NO: 25, SEQ ID NO: 26, SEQ ID NO: 27, SEQ ID NO: 28, SEQ ID NO: 29, SEQ ID NO: 30, SEQ ID NO: 31, SEQ ID NO: 32, SEQ ID NO: 33, SEQ ID NO: 34, SEQ ID NO: 35, SEQ ID NO: 36, SEQ ID NO: 37, SEQ ID NO: 38, SEQ ID NO: 39, SEQ ID NO: 40, SEQ ID NO: 41, SEQ ID NO: 42, SEQ ID NO: 43, SEQ ID NO: 44, SEQ ID NO: 45, SEQ ID NO: 46, SEQ ID NO: 47, SEQ ID NO: 48, SEQ ID NO: 49, SEQ ID NO: 50, SEQ ID NO: 51, SEQ ID NO: 52, SEQ ID NO: 53, SEQ ID NO: 81, SEQ ID NO: 92, SEQ ID NO: 93, SEQ ID NO: 82, SEQ ID NO: 83, SEQ ID NO: 84, SEQ ID NO: 85, SEQ ID NO: 86, SEQ ID NO: 87, SEQ ID NO: 95, SEQ ID NO: 96, SEQ ID NO: 97, SEQ ID NO: 98, SEQ ID NO: 88, SEQ ID NO: 89, SEQ ID NO: 90, SEQ ID NO: 91, SEQ ID NO: 92, SEQ ID NO: 93, SEQ ID NO: 94, SEQ ID NO: 95, SEQ ID NO: 96, SEQ ID NO: 97, or SEQ ID NO: 98.

[0247] In some examples of any of the ABPCs described herein, the first antigen-binding domain includes a light chain variable domain comprising SEQ ID NO: 118, and a heavy chain variable domain comprising SEQ ID NO: 1, SEQ ID NO: 13, SEQ ID NO: 14, SEQ ID NO: 15, SEQ ID NO: 16, SEQ ID NO: 17, SEQ ID NO: 18, SEQ ID NO: 19, SEQ ID NO: 20, SEQ ID NO: 21, SEQ ID NO: 22, SEQ ID NO: 23, SEQ ID NO: 24, SEQ ID NO: 25, SEQ ID NO: 26, SEQ ID NO: 27, SEQ ID NO: 28, SEQ ID NO: 29, SEQ ID NO: 30, SEQ ID NO: 31, SEQ ID NO: 32, SEQ ID NO: 33, SEQ ID NO: 34, SEQ ID NO: 35, SEQ ID NO: 36, SEQ ID NO: 37, SEQ ID NO: 38, SEQ ID NO: 39, SEQ ID NO: 40, SEQ ID NO: 41, SEQ ID NO: 42, SEQ ID NO: 43, SEQ ID NO: 44, SEQ ID NO: 45, SEQ ID NO: 46, SEQ ID NO: 47, SEQ ID NO: 48, SEQ ID NO: 49, SEQ ID NO: 50, SEQ ID NO: 51, SEQ ID NO: 52, SEQ ID NO: 53, SEQ ID NO: 81, SEQ ID NO: 92, SEQ ID NO: 93, SEQ ID NO: 82, SEQ ID NO: 83, SEQ ID NO: 84, SEQ ID NO: 85, SEQ ID NO: 86, SEQ ID NO: 87, SEQ ID NO: 95, SEQ ID NO: 96, SEQ ID NO: 97, SEQ ID NO: 98, SEQ ID NO: 88, SEQ ID NO: 89, SEQ ID NO: 90, SEQ ID NO: 91, SEQ ID NO: 92, SEQ ID NO: 93, SEQ ID NO: 94, SEQ ID NO: 95, SEQ ID NO: 96, SEQ ID NO: 97, or SEQ ID NO: 98.

[0248] In some examples of any of the ABPCs described herein, the first antigen-binding domain includes a light chain variable domain comprising SEQ ID NO: 65 or SEQ ID NO: 77.

[0249] In some examples of any of the ABPCs described herein, the first antigen-binding domain includes a heavy chain variable domain comprising SEQ ID NO: 19, SEQ ID NO: 21, SEQ ID NO: 30, SEQ ID NO: 31, SEQ ID NO: 51, SEQ ID NO: 81, SEQ ID NO: 82, SEQ ID NO: 83, SEQ ID NO: 84, SEQ ID NO: 85, SEQ ID NO: 86, SEQ ID NO: 87, SEQ ID NO: 88, SEQ ID NO: 89, SEQ ID NO: 90, SEQ ID NO: 91, SEQ ID NO: 92, SEQ ID NO: 93, SEQ ID NO: 94, SEQ ID NO: 95, SEQ ID NO: 96, SEQ ID NO: 97, or SEQ ID NO: 98.

[0250] In some examples of any of the ABPCs described herein, the first antigen-binding domain includes a light chain variable domain comprising SEQ ID NO: 65, and a heavy chain variable domain comprising SEQ ID NO: 19, SEQ ID NO: 21, SEQ ID NO: 30, SEQ ID NO: 31, SEQ ID NO: 51, SEQ ID NO: 81, SEQ ID NO: 82, SEQ ID NO: 83, SEQ ID NO: 84, SEQ ID NO: 85, SEQ ID NO: 86, SEQ ID NO: 87, SEQ ID NO: 88, SEQ ID NO: 89, SEQ ID NO: 90, SEQ ID NO: 91, SEQ ID NO: 92, SEQ ID NO: 93, SEQ ID NO: 94, SEQ ID NO: 95, SEQ ID NO: 96, SEQ ID NO: 97, or SEQ ID NO: 98.

[0251] In some examples of any of the ABPCs described herein, the first antigen-binding domain includes a light chain variable domain comprising SEQ ID NO: 77, and a heavy chain variable domain comprising SEQ ID NO: 19, SEQ ID NO: 21, SEQ ID NO: 30, SEQ ID NO: 31, SEQ ID NO: 51, SEQ ID NO: 81, SEQ ID NO: 82, SEQ ID NO: 83, SEQ ID NO: 84, SEQ ID NO: 85, SEQ ID NO: 86, SEQ ID NO: 87, SEQ ID NO: 88, SEQ ID NO: 89, SEQ ID NO: 90, SEQ ID NO: 91, SEQ ID NO: 92, SEQ ID NO: 93, SEQ ID NO: 94, SEQ ID NO: 95, SEQ ID NO: 96, SEQ ID NO: 97, or SEQ ID NO: 98.

[0252] In some examples of any of the ABPCs described herein, the first antigen-binding domain includes a heavy chain variable domain of SC16.4 with one or more (e.g., one, two, three, four, five, six, seven, eight, nine, ten, eleven, twelve, thirteen, fourteen, fifteen, sixteen, seventeen, eighteen, nineteen, or twenty) amino acids substituted with a histidine. In some examples of any of the ABPCs described herein, the first antigen-binding domain includes a light chain variable domain of SC16.4 with one or more (e.g., one, two, three, four, five, six, seven, eight, nine, ten, eleven, twelve, thirteen, fourteen, fifteen, sixteen, seventeen, eighteen, nineteen, or twenty) amino acids substituted with a histidine. In some examples of any of the ABPCs described herein, the first antigen-binding domain includes a heavy chain variable domain of SC16.4 with one or more (e.g., one, two, three, four, five, six, seven, eight, nine, ten, eleven, twelve, thirteen, fourteen, fifteen, sixteen, seventeen, eighteen, nineteen, or twenty) amino acids substituted with a histidine; and a light chain variable domain of SC16.4 with one or more (e.g., one, two, three, four, five, six, seven, eight, nine, ten, eleven, twelve, thirteen, fourteen, fifteen, sixteen, seventeen, eighteen, nineteen, or twenty) amino acids substituted with a histidine. In some examples of any of the ABPCs described herein, the heavy chain variable domain of SC16.4 comprises SEQ ID NO: 119. In some examples of any of the ABPCs described herein, the light chain variable domain of SC16.4 comprises SEQ ID NO: 120.

[0253] In some examples of any of the ABPCs described herein, the first antigen-binding domain comprises a heavy chain variable domain comprising a CDR1, a CDR2, and a CDR3 of SEQ ID NO: 622, SEQ ID NO: 623, and SEQ ID NO: 624, respectively, with collectively a total of one or more (e.g., one, two, three, four, five, six, seven, eight, nine, or ten) amino acid positions in SEQ ID NOs: 622-624 substituted with a histidine. In some examples of any of the ABPCs described herein, the first antigen-binding domain comprises a light chain variable domain comprising a CDR1, a CDR2, and a CDR3 of SEQ ID NO: 625, SEQ ID NO: 626, and SEQ ID NO: 627, respectively, with collectively a total of one or more (e.g., one, two, three, four, five, six, seven, eight, nine, or ten) amino acid positions in SEQ ID NOs: 625-627 substituted with a histidine. In some examples of any of the ABPCs described herein, the first antigen-binding domain includes: a heavy chain variable domain comprising a CDR1, a CDR2, and a CDR3 of SEQ ID NO: 622, SEQ ID NO: 623, and SEQ ID NO: 624, respectively, with collectively a total of one or more (e.g., one, two, three, four, five, six, seven, eight, nine, or ten) amino acid positions in SEQ ID NOs: 622-624 substituted with a histidine; and a light chain variable domain comprising a CDR1, a CDR2, and a CDR3 of SEQ ID NO: 625, SEQ ID NO: 626, and SEQ ID NO: 627, respectively, with collectively a total of one or more (e.g., one, two, three, four, five, six, seven, eight, nine, or ten) amino acid positions in SEQ ID NOs: 625-627 substituted with a histidine.

[0254] In some examples of any of the ABPCs described herein, the first antigen-binding domain includes a heavy chain variable domain that is at least 90% (e.g., at least 92%, at least 94%, at least 96%, at least 98%, at least 99%, or 100%) identical to SEQ ID NO: 119, where the heavy chain variable domain includes a histidine at one or more (e.g., one, two, three, four, five, six, seven, eight, nine, ten, eleven, twelve, thirteen, fourteen, fifteen, sixteen, seventeen, eighteen, nineteen, or twenty) amino acid positions in SEQ ID NO: 119 selected from the group consisting of: 32, 50, 52, 53, 57, 58, 59, 60, 62, 64, 65, 97, 98, 99, 100, 102, 104, and 105. In some examples of any of the ABPCs described herein, the first antigen-binding domain includes a light chain variable domain that is at least 90% (e.g., at least 92%, at least 94%, at least 96%, at least 98%, at least 99%, or 100%) identical to SEQ ID NO: 120, where the light chain variable domain includes a histidine at one or more (e.g., one, two, three, four, five, six, seven, eight, nine, ten, eleven, twelve, thirteen, fourteen, fifteen, sixteen, seventeen, eighteen, nineteen, or twenty) amino acid positions in SEQ ID NO: 120 selected from the group consisting of: 29, 32, 34, 91, 92, 93, 94 and 96. In some examples of any of the ABPCs described herein the first antigen-binding domain includes: a heavy chain variable domain that is at least 90% (e.g., at least 92%, at least 94%, at least 96%, at least 98%, at least 99%, or 100%) identical to SEQ ID NO: 119, where the heavy chain variable domain includes a histidine at one or more (e.g., one, two, three, four, five, six, seven, eight, nine, ten, eleven, twelve, thirteen, fourteen, fifteen, sixteen, seventeen, eighteen, nineteen, or twenty) amino acid positions in SEQ ID NO: 119 selected from the group consisting of: 32, 50, 52, 53, 57, 58, 59, 60, 62, 64, 65, 97, 98, 99, 100, 102, 104, and 105, and a light chain variable domain that is at least 90% (e.g., at least 92%, at least 94%, at least 96%, at least 98%, at least 99%, or 100%) identical to SEQ ID NO: 120, where the light chain variable domain includes a histidine at one or more (e.g., one, two, three, four, five, six, seven, eight, nine, ten, eleven, twelve, thirteen, fourteen, fifteen, sixteen, seventeen, eighteen, nineteen, or twenty) amino acid positions in SEQ ID NO: 120 selected from the group consisting of: 29, 32, 34, 91, 92, 93, 94 and 96.

[0255] In some examples of any of the ABPCs described herein, a heavy chain variable domain includes a heavy chain variable domain that is at least 90% (e.g., at least 92%, at least 94%, at least 96%, at least 98%, at least 99%, or 100%) identical to SEQ ID NO: 119, where the heavy chain variable domain includes a histidine at any of the specific combinations of one or more amino acid positions in SEQ ID NO: 119 listed in Table 3.

[0256] In some examples of any of the ABPCs described herein, the first antigen-binding domain includes a heavy chain variable domain that is at least 90% (e.g., at least 92%, at least 94%, at least 96%, at least 98%, at least 99%, or 100%) identical to SEQ ID NO: 119, where the heavy chain variable domain includes an alanine at position 35 in SEQ ID NO: 119.

[0257] In some examples of any of the ABPCs described herein the first antigen-binding domain includes: a heavy chain variable domain that is at least 90% (e.g., at least 92%, at least 94%, at least 96%, at least 98%, at least 99%, or 100%) identical to SEQ ID NO: 119, where the heavy chain variable domain includes an alanine at position 35 in SEQ ID NO: 119, and a light chain variable domain that is at least 90% (e.g., at least 92%, at least 94%, at least 96%, at least 98%, at least 99%, or 100%) identical to SEQ ID NO: 120, where the light chain variable domain includes a histidine at one or more (e.g., one, two, three, four, five, six, seven, eight, nine, ten, eleven, twelve, thirteen, fourteen, fifteen, sixteen, seventeen, eighteen, nineteen, or twenty) amino acid positions in SEQ ID NO: 120 selected from the group consisting of: 29, 32, 34, 91, 92, 93, 94 and 96.

[0258] In some examples of any of the ABPCs described herein, the first antigen-binding domain includes a heavy chain variable domain that is at least 90% (e.g., at least 92%, at least 94%, at least 96%, at least 98%, at least 99%, or 100%) identical to SEQ ID NO: 119, where the heavy chain variable domain includes a histidine at one or more (e.g., one, two, three, four, five, six, seven, eight, nine, ten, eleven, twelve, thirteen, fourteen, fifteen, sixteen, seventeen, eighteen, nineteen, or twenty) amino acid positions in SEQ ID NO: 119 selected from the group consisting of: 32, 50, 52, 53, 57, 58, 59, 60, 62, 64, 65, 97, 98, 99, 100, 102, 104, and 105, and where the heavy chain variable domain includes an alanine at position 35 in SEQ ID NO: 119.

[0259] In some examples of any of the ABPCs described herein the first antigen-binding domain includes: a heavy chain variable domain that is at least 90% (e.g., at least 92%, at least 94%, at least 96%, at least 98%, at least 99%, or 100%) identical to SEQ ID NO: 119, where the heavy chain variable domain includes a histidine at one or more (e.g., one, two, three, four, five, six, seven, eight, nine, ten, eleven, twelve, thirteen, fourteen, fifteen, sixteen, seventeen, eighteen, nineteen, or twenty) amino acid positions in SEQ ID NO: 119 selected from the group consisting of: 32, 50, 52, 53, 57, 58, 59, 60, 62, 64, 65, 97, 98, 99, 100, 102, 104, and 105, and where the heavy chain variable domain includes an alanine at position 35 in SEQ ID NO: 119, and a light chain variable domain that is at least 90% (e.g., at least 92%, at least 94%, at least 96%, at least 98%, at least 99%, or 100%) identical to SEQ ID NO: 120, where the light chain variable domain includes a histidine at one or more (e.g., one, two, three, four, five, six, seven, eight, nine, ten, eleven, twelve, thirteen, fourteen, fifteen, sixteen, seventeen, eighteen, nineteen, or twenty) amino acid positions in SEQ ID NO: 120 selected from the group consisting of 29, 32, 34, 91, 92, 93, 94 and 96.

[0260] In some examples of any of the ABPCs described herein, a heavy chain variable domain includes a heavy chain variable domain that is at least 90% (e.g., at least 92%, at least 94%, at least 96%, at least 98%, at least 99%, or 100%) identical to SEQ ID NO: 119, where the heavy chain variable domain includes a histidine at any of the specific combinations of one or more amino acid positions in SEQ ID NO: 119 listed in Table 3 and where the heavy chain variable domain includes an alanine at position 35 of SEQ ID NO: 119.

TABLE 3
Exemplary Combinations of Amino Acid Positions in SEQ
ID NO: 119 that can be substituted with histidine

32 + 50, 32 + 52, 32 + 53, 32 + 57, 32 + 58, 32 + 59, 32 + 60, 32 + 62, 32 + 64, 32 + 65, 32 +
97, 32 + 98, 32 + 99, 32 + 100, 32 + 102, 32 + 104, 32 + 105, 50 + 52, 50 + 53, 50 + 57, 50 +
58, 50 + 59, 50 + 60, 50 + 62, 50 + 64, 50 + 65, 50 + 97, 50 + 98, 50 + 99, 50 + 100, 50 + 102,
50 + 104, 50 + 105, 52 + 53, 52 + 57, 52 + 58, 52 + 59, 52 + 60, 52 + 62, 52 + 64, 52 + 65, 52 +
97, 52 + 98, 52 + 99, 52 + 100, 52 + 102, 52 + 104, 52 + 105, 53 + 57, 53 + 58, 53 + 59, 53 +
60, 53 + 62, 53 + 64, 53 + 65, 53 + 97, 53 + 98, 53 + 99, 53 + 100, 53 + 102, 53 + 104, 53 +
105, 57 + 58, 57 + 59, 57 + 60, 57 + 62, 57 + 64, 57 + 65, 57 + 97, 57 + 98, 57 + 99, 57 + 100,
57 + 102, 57 + 104, 57 + 105, 58 + 59, 58 + 60, 58 + 62, 58 + 64, 58 + 65, 58 + 97, 58 + 98,
58 + 99, 58 + 100, 58 + 102, 58 + 104, 58 + 105, 59 + 60, 59 + 62, 59 + 64, 59 + 65, 59 + 97,
59 + 98, 59 + 99, 59 + 100, 59 + 102, 59 + 104, 59 + 105, 60 + 62, 60 + 64, 60 + 65, 60 + 97,
60 + 98, 60 + 99, 60 + 100, 60 + 102, 60 + 104, 60 + 105, 62 + 64, 62 + 65, 62 + 97, 62 + 98,
62 + 99, 62 + 100, 62 + 102, 62 + 104, 62 + 105, 64 + 65, 64 + 97, 64 + 98, 64 + 99, 64 + 100,
64 + 102, 64 + 104, 64 + 105, 65 + 97, 65 + 98, 65 + 99, 65 + 100, 65 + 102, 65 + 104, 65 +
105, 97 + 98, 97 + 99, 97 + 100, 97 + 102, 97 + 104, 97 + 105, 98 + 99, 98 + 100, 98 + 102,
98 + 104, 98 + 105, 99 + 100, 99 + 102, 99 + 104, 99 + 105, 100 + 102, 100 + 104, 100 + 105,
102 + 104, 102 + 105, 104 + 105, 32 + 50 + 52, 32 + 50 + 53, 32 + 50 + 57, 32 + 50 + 58, 32 +
50 + 59, 32 + 50 + 60, 32 + 50 + 62, 32 + 50 + 64, 32 + 50 + 65, 32 + 50 + 97, 32 + 50 + 98,
32 + 50 + 99, 32 + 50 + 100, 32 + 50 + 102, 32 + 50 + 104, 32 + 50 + 105, 32 + 52 + 53, 32 +
52 + 57, 32 + 52 + 58, 32 + 52 + 59, 32 + 52 + 60, 32 + 52 + 62, 32 + 52 + 64, 32 + 52 + 65,
32 + 52 + 97, 32 + 52 + 98, 32 + 52 + 99, 32 + 52 + 100, 32 + 52 + 102, 32 + 52 + 104, 32 +
52 + 105, 32 + 53 + 57, 32 + 53 + 58, 32 + 53 + 59, 32 + 53 + 60, 32 + 53 + 62, 32 + 53 + 64,
32 + 53 + 65, 32 + 53 + 97, 32 + 53 + 98, 32 + 53 + 99, 32 + 53 + 100, 32 + 53 + 102, 32 + 53 +
104, 32 + 53 + 105, 32 + 57 + 58, 32 + 57 + 59, 32 + 57 + 60, 32 + 57 + 62, 32 + 57 + 64,
32 + 57 + 65, 32 + 57 + 97, 32 + 57 + 98, 32 + 57 + 99, 32 + 57 + 100, 32 + 57 + 102, 32 + 57 +
104, 32 + 57 + 105, 32 + 58 + 59, 32 + 58 + 60, 32 + 58 + 62, 32 + 58 + 64, 32 + 58 + 65,
32 + 58 + 97, 32 + 58 + 98, 32 + 58 + 99, 32 + 58 + 100, 32 + 58 + 102, 32 + 58 + 104, 32 +
58 + 105, 32 + 59 + 60, 32 + 59 + 62, 32 + 59 + 64, 32 + 59 + 65, 32 + 59 + 97, 32 + 59 + 98,
32 + 59 + 99, 32 + 59 + 100, 32 + 59 + 102, 32 + 59 + 104, 32 + 59 + 105, 32 + 60 + 62, 32 +
60 + 64, 32 + 60 + 65, 32 + 60 + 97, 32 + 60 + 98, 32 + 60 + 99, 32 + 60 + 100, 32 + 60 +
102, 32 + 60 + 104, 32 + 60 + 105, 32 + 62 + 64, 32 + 62 + 65, 32 + 62 + 97, 32 + 62 + 98, 32 +
62 + 99, 32 + 62 + 100, 32 + 62 + 102, 32 + 62 + 104, 32 + 62 + 105, 32 + 64 + 65, 32 + 64 +
97, 32 + 64 + 98, 32 + 64 + 99, 32 + 64 + 100, 32 + 64 + 102, 32 + 64 + 104, 32 + 64 + 105,
32 + 65 + 97, 32 + 65 + 98, 32 + 65 + 99, 32 + 65 + 100, 32 + 65 + 102, 32 + 65 + 104, 32 +
65 + 105, 32 + 97 + 98, 32 + 97 + 99, 32 + 97 + 100, 32 + 97 + 102, 32 + 97 + 104, 32 + 97 +
105, 32 + 98 + 99, 32 + 98 + 100, 32 + 98 + 102, 32 + 98 + 104, 32 + 98 + 105, 32 + 99 + 100,
32 + 99 + 102, 32 + 99 + 104, 32 + 99 + 105, 32 + 100 + 102, 32 + 100 + 104, 32 + 100 + 105,
32 + 102 + 104, 32 + 102 + 105, 32 + 104 + 105, 50 + 52 + 53, 50 + 52 + 57, 50 + 52 + 58, 50 +
52 + 59, 50 + 52 + 60, 50 + 52 + 62, 50 + 52 + 64, 50 + 52 + 65, 50 + 52 + 97, 50 + 52 + 98,
50 + 52 + 99, 50 + 52 + 100, 50 + 52 + 102, 50 + 52 + 104, 50 + 52 + 105, 50 + 53 + 57, 50 +
53 + 58, 50 + 53 + 59, 50 + 53 + 60, 50 + 53 + 62, 50 + 53 + 64, 50 + 53 + 65, 50 + 53 + 97,
50 + 53 + 98, 50 + 53 + 99, 50 + 53 + 100, 50 + 53 + 102, 50 + 53 + 104, 50 + 53 + 105, 50 +
57 + 58, 50 + 57 + 59, 50 + 57 + 60, 50 + 57 + 62, 50 + 57 + 64, 50 + 57 + 65, 50 + 57 + 97,
50 + 57 + 98, 50 + 57 + 99, 50 + 57 + 100, 50 + 57 + 102, 50 + 57 + 104, 50 + 57 + 105, 50 +
58 + 59, 50 + 58 + 60, 50 + 58 + 62, 50 + 58 + 64, 50 + 58 + 65, 50 + 58 + 97, 50 + 58 + 98,
50 + 58 + 99, 50 + 58 + 100, 50 + 58 + 102, 50 + 58 + 104, 50 + 58 + 105, 50 + 59 + 60, 50 +
59 + 62, 50 + 59 + 64, 50 + 59 + 65, 50 + 59 + 97, 50 + 59 + 98, 50 + 59 + 99, 50 + 59 + 100,
50 + 59 + 102, 50 + 59 + 104, 50 + 59 + 105, 50 + 60 + 62, 50 + 60 + 64, 50 + 60 + 65, 50 +
60 + 97, 50 + 60 + 98, 50 + 60 + 99, 50 + 60 + 100, 50 + 60 + 102, 50 + 60 + 104, 50 + 60 +
105, 50 + 62 + 64, 50 + 62 + 65, 50 + 62 + 97, 50 + 62 + 98, 50 + 62 + 99, 50 + 62 + 100, 50 +
62 + 102, 50 + 62 + 104, 50 + 62 + 105, 50 + 64 + 65, 50 + 64 + 97, 50 + 64 + 98, 50 + 64 +
99, 50 + 64 + 100, 50 + 64 + 102, 50 + 64 + 104, 50 + 64 + 105, 50 + 65 + 97, 50 + 65 + 98,
50 + 65 + 99, 50 + 65 + 100, 50 + 65 + 102, 50 + 65 + 104, 50 + 65 + 105, 50 + 97 + 98, 50 +
97 + 99, 50 + 97 + 100, 50 + 97 + 102, 50 + 97 + 104, 50 + 97 + 105, 50 + 98 + 99, 50 + 98 +
100, 50 + 98 + 102, 50 + 98 + 104, 50 + 98 + 105, 50 + 99 + 100, 50 + 99 + 102, 50 + 99 +
104, 50 + 99 + 105, 50 + 100 + 102, 50 + 100 + 104, 50 + 100 + 105, 50 + 102 + 104, 50 +
102 + 105, 50 + 104 + 105, 52 + 53 + 57, 52 + 53 + 58, 52 + 53 + 59, 52 + 53 + 60, 52 + 53 +
62, 52 + 53 + 64, 52 + 53 + 65, 52 + 53 + 97, 52 + 53 + 98, 52 + 53 + 99, 52 + 53 + 100, 52 +
53 + 102, 52 + 53 + 104, 52 + 53 + 105, 52 + 57 + 58, 52 + 57 + 59, 52 + 57 + 60, 52 + 57 +
62, 52 + 57 + 64, 52 + 57 + 65, 52 + 57 + 97, 52 + 57 + 98, 52 + 57 + 99, 52 + 57 + 100, 52 +
57 + 102, 52 + 57 + 104, 52 + 57 + 105, 52 + 58 + 59, 52 + 58 + 60, 52 + 58 + 62, 52 + 58 +
64, 52 + 58 + 65, 52 + 58 + 97, 52 + 58 + 98, 52 + 58 + 99, 52 + 58 + 100, 52 + 58 + 102, 52 +
58 + 104, 52 + 58 + 105, 52 + 59 + 60, 52 + 59 + 62, 52 + 59 + 64, 52 + 59 + 65, 52 + 59 +
97, 52 + 59 + 98, 52 + 59 + 99, 52 + 59 + 100, 52 + 59 + 102, 52 + 59 + 104, 52 + 59 + 105,
52 + 60 + 62, 52 + 60 + 64, 52 + 60 + 65, 52 + 60 + 97, 52 + 60 + 98, 52 + 60 + 99, 52 + 60 +
100, 52 + 60 + 102, 52 + 60 + 104, 52 + 60 + 105, 52 + 62 + 64, 52 + 62 + 65, 52 + 62 + 97,
52 + 62 + 98, 52 + 62 + 99, 52 + 62 + 100, 52 + 62 + 102, 52 + 62 + 104, 52 + 62 + 105, 52 +
64 + 65, 52 + 64 + 97, 52 + 64 + 98, 52 + 64 + 99, 52 + 64 + 100, 52 + 64 + 102, 52 + 64 +
104, 52 + 64 + 105, 52 + 65 + 97, 52 + 65 + 98, 52 + 65 + 99, 52 + 65 + 100, 52 + 65 + 102,
52 + 65 + 104, 52 + 65 + 105, 52 + 97 + 98, 52 + 97 + 99, 52 + 97 + 100, 52 + 97 + 102, 52 +
97 + 104, 52 + 97 + 105, 52 + 98 + 99, 52 + 98 + 100, 52 + 98 + 102, 52 + 98 + 104, 52 + 98 +
105, 52 + 99 + 100, 52 + 99 + 102, 52 + 99 + 104, 52 + 99 + 105, 52 + 100 + 102, 52 + 100 +
104, 52 + 100 + 105, 52 + 102 + 104, 52 + 102 + 105, 52 + 104 + 105, 53 + 57 + 58, 53 + 57 +
59, 53 + 57 + 60, 53 + 57 + 62, 53 + 57 + 64, 53 + 57 + 65, 53 + 57 + 97, 53 + 57 + 98, 53 +
57 + 99, 53 + 57 + 100, 53 + 57 + 102, 53 + 57 + 104, 53 + 57 + 105, 53 + 58 + 59, 53 + 58 +
60, 53 + 58 + 62, 53 + 58 + 64, 53 + 58 + 65, 53 + 58 + 97, 53 + 58 + 98, 53 + 58 + 99, 53 +
58 + 100, 53 + 58 + 102, 53 + 58 + 104, 53 + 58 + 105, 53 + 59 + 60, 53 + 59 + 62, 53 + 59 +
64, 53 + 59 + 65, 53 + 59 + 97, 53 + 59 + 98, 53 + 59 + 99, 53 + 59 + 100, 53 + 59 + 102, 53 +
59 + 104, 53 + 59 + 105, 53 + 60 + 62, 53 + 60 + 64, 53 + 60 + 65, 53 + 60 + 97, 53 + 60 +
98, 53 + 60 + 99, 53 + 60 + 100, 53 + 60 + 102, 53 + 60 + 104, 53 + 60 + 105, 53 + 62 + 64,
53 + 62 + 65, 53 + 62 + 97, 53 + 62 + 98, 53 + 62 + 99, 53 + 62 + 100, 53 + 62 + 102, 53 + 62 +
104, 53 + 62 + 105, 53 + 64 + 65, 53 + 64 + 97, 53 + 64 + 98, 53 + 64 + 99, 53 + 64 + 100,
53 + 64 + 102, 53 + 64 + 104, 53 + 64 + 105, 53 + 65 + 97, 53 + 65 + 98, 53 + 65 + 99, 53 +
65 + 100, 53 + 65 + 102, 53 + 65 + 104, 53 + 65 + 105, 53 + 97 + 98, 53 + 97 + 99, 53 + 97 +
100, 53 + 97 + 102, 53 + 97 + 104, 53 + 97 + 105, 53 + 98 + 99, 53 + 98 + 100, 53 + 98 + 102,
53 + 98 + 104, 53 + 98 + 105, 53 + 99 + 100, 53 + 99 + 102, 53 + 99 + 104, 53 + 99 + 105, 53 +
100 + 102, 53 + 100 + 104, 53 + 100 + 105, 53 + 102 + 104, 53 + 102 + 105, 53 + 104 +
105, 57 + 58 + 59, 57 + 58 + 60, 57 + 58 + 62, 57 + 58 + 64, 57 + 58 + 65, 57 + 58 + 97, 57 +
58 + 98, 57 + 58 + 99, 57 + 58 + 100, 57 + 58 + 102, 57 + 58 + 104, 57 + 58 + 105, 57 + 59 +
60, 57 + 59 + 62, 57 + 59 + 64, 57 + 59 + 65, 57 + 59 + 97, 57 + 59 + 98, 57 + 59 + 99, 57 +
59 + 100, 57 + 59 + 102, 57 + 59 + 104, 57 + 59 + 105, 57 + 60 + 62, 57 + 60 + 64, 57 + 60 +
65, 57 + 60 + 97, 57 + 60 + 98, 57 + 60 + 99, 57 + 60 + 100, 57 + 60 + 102, 57 + 60 + 104, 57 +
60 + 105, 57 + 62 + 64, 57 + 62 + 65, 57 + 62 + 97, 57 + 62 + 98, 57 + 62 + 99, 57 + 62 +
100, 57 + 62 + 102, 57 + 62 + 104, 57 + 62 + 105, 57 + 64 + 65, 57 + 64 + 97, 57 + 64 + 98,
57 + 64 + 99, 57 + 64 + 100, 57 + 64 + 102, 57 + 64 + 104, 57 + 64 + 105, 57 + 65 + 97, 57 +
65 + 98, 57 + 65 + 99, 57 + 65 + 100, 57 + 65 + 102, 57 + 65 + 104, 57 + 65 + 105, 57 + 97 +
98, 57 + 97 + 99, 57 + 97 + 100, 57 + 97 + 102, 57 + 97 + 104, 57 + 97 + 105, 57 + 98 + 99,
57 + 98 + 100, 57 + 98 + 102, 57 + 98 + 104, 57 + 98 + 105, 57 + 99 + 100, 57 + 99 + 102, 57 +
99 + 104, 57 + 99 + 105, 57 + 100 + 102, 57 + 100 + 104, 57 + 100 + 105, 57 + 102 + 104,
57 + 102 + 105, 57 + 104 + 105, 58 + 59 + 60, 58 + 59 + 62, 58 + 59 + 64, 58 + 59 + 65, 58 +
59 + 97, 58 + 59 + 98, 58 + 59 + 99, 58 + 59 + 100, 58 + 59 + 102, 58 + 59 + 104, 58 + 59 +
105, 58 + 60 + 62, 58 + 60 + 64, 58 + 60 + 65, 58 + 60 + 97, 58 + 60 + 98, 58 + 60 + 99, 58 +
60 + 100, 58 + 60 + 102, 58 + 60 + 104, 58 + 60 + 105, 58 + 62 + 64, 58 + 62 + 65, 58 + 62 +
97, 58 + 62 + 98, 58 + 62 + 99, 58 + 62 + 100, 58 + 62 + 102, 58 + 62 + 104, 58 + 62 + 105,
58 + 64 + 65, 58 + 64 + 97, 58 + 64 + 98, 58 + 64 + 99, 58 + 64 + 100, 58 + 64 + 102, 58 + 64 +
104, 58 + 64 + 105, 58 + 65 + 97, 58 + 65 + 98, 58 + 65 + 99, 58 + 65 + 100, 58 + 65 + 102,
58 + 65 + 104, 58 + 65 + 105, 58 + 97 + 98, 58 + 97 + 99, 58 + 97 + 100, 58 + 97 + 102, 58 +
97 + 104, 58 + 97 + 105, 58 + 98 + 99, 58 + 98 + 100, 58 + 98 + 102, 58 + 98 + 104, 58 + 98 +
105, 58 + 99 + 100, 58 + 99 + 102, 58 + 99 + 104, 58 + 99 + 105, 58 + 100 + 102, 58 + 100 +
104, 58 + 100 + 105, 58 + 102 + 104, 58 + 102 + 105, 58 + 104 + 105, 59 + 60 + 62, 59 + 60 +
64, 59 + 60 + 65, 59 + 60 + 97, 59 + 60 + 98, 59 + 60 + 99, 59 + 60 + 100, 59 + 60 + 102,
59 + 60 + 104, 59 + 60 + 105, 59 + 62 + 64, 59 + 62 + 65, 59 + 62 + 97, 59 + 62 + 98, 59 + 62 +
99, 59 + 62 + 100, 59 + 62 + 102, 59 + 62 + 104, 59 + 62 + 105, 59 + 64 + 65, 59 + 64 + 97,
59 + 64 + 98, 59 + 64 + 99, 59 + 64 + 100, 59 + 64 + 102, 59 + 64 + 104, 59 + 64 + 105, 59 +
65 + 97, 59 + 65 + 98, 59 + 65 + 99, 59 + 65 + 100, 59 + 65 + 102, 59 + 65 + 104, 59 + 65 +
105, 59 + 97 + 98, 59 + 97 + 99, 59 + 97 + 100, 59 + 97 + 102, 59 + 97 + 104, 59 + 97 + 105,
59 + 98 + 99, 59 + 98 + 100, 59 + 98 + 102, 59 + 98 + 104, 59 + 98 + 105, 59 + 99 + 100, 59 +
99 + 102, 59 + 99 + 104, 59 + 99 + 105, 59 + 100 + 102, 59 + 100 + 104, 59 + 100 + 105, 59 +
102 + 104, 59 + 102 + 105, 59 + 104 + 105, 60 + 62 + 64, 60 + 62 + 65, 60 + 62 + 97, 60 +
62 + 98, 60 + 62 + 99, 60 + 62 + 100, 60 + 62 + 102, 60 + 62 + 104, 60 + 62 + 105, 60 + 64 +
65, 60 + 64 + 97, 60 + 64 + 98, 60 + 64 + 99, 60 + 64 + 100, 60 + 64 + 102, 60 + 64 + 104, 60 +
64 + 105, 60 + 65 + 97, 60 + 65 + 98, 60 + 65 + 99, 60 + 65 + 100, 60 + 65 + 102, 60 + 65 +
104, 60 + 65 + 105, 60 + 97 + 98, 60 + 97 + 99, 60 + 97 + 100, 60 + 97 + 102, 60 + 97 + 104,
60 + 97 + 105, 60 + 98 + 99, 60 + 98 + 100, 60 + 98 + 102, 60 + 98 + 104, 60 + 98 + 105, 60 +
99 + 100, 60 + 99 + 102, 60 + 99 + 104, 60 + 99 + 105, 60 + 100 + 102, 60 + 100 + 104, 60 +
100 + 105, 60 + 102 + 104, 60 + 102 + 105, 60 + 104 + 105, 62 + 64 + 65, 62 + 64 + 97, 62 +
64 + 98, 62 + 64 + 99, 62 + 64 + 100, 62 + 64 + 102, 62 + 64 + 104, 62 + 64 + 105, 62 + 65 +
97, 62 + 65 + 98, 62 + 65 + 99, 62 + 65 + 100, 62 + 65 + 102, 62 + 65 + 104, 62 + 65 + 105,
62 + 97 + 98, 62 + 97 + 99, 62 + 97 + 100, 62 + 97 + 102, 62 + 97 + 104, 62 + 97 + 105, 62 +
98 + 99, 62 + 98 + 100, 62 + 98 + 102, 62 + 98 + 104, 62 + 98 + 105, 62 + 99 + 100, 62 + 99 +
102, 62 + 99 + 104, 62 + 99 + 105, 62 + 100 + 102, 62 + 100 + 104, 62 + 100 + 105, 62 +
102 + 104, 62 + 102 + 105, 62 + 104 + 105, 64 + 65 + 97, 64 + 65 + 98, 64 + 65 + 99, 64 + 65 +
100, 64 + 65 + 102, 64 + 65 + 104, 64 + 65 + 105, 64 + 97 + 98, 64 + 97 + 99, 64 + 97 +
100, 64 + 97 + 102, 64 + 97 + 104, 64 + 97 + 105, 64 + 98 + 99, 64 + 98 + 100, 64 + 98 + 102,
64 + 98 + 104, 64 + 98 + 105, 64 + 99 + 100, 64 + 99 + 102, 64 + 99 + 104, 64 + 99 + 105, 64 +
100 + 102, 64 + 100 + 104, 64 + 100 + 105, 64 + 102 + 104, 64 + 102 + 105, 64 + 104 +
105, 65 + 97 + 98, 65 + 97 + 99, 65 + 97 + 100, 65 + 97 + 102, 65 + 97 + 104, 65 + 97 + 105,
65 + 98 + 99, 65 + 98 + 100, 65 + 98 + 102, 65 + 98 + 104, 65 + 98 + 105, 65 + 99 + 100, 65 +
99 + 102, 65 + 99 + 104, 65 + 99 + 105, 65 + 100 + 102, 65 + 100 + 104, 65 + 100 + 105, 65 +
102 + 104, 65 + 102 + 105, 65 + 104 + 105, 97 + 98 + 99, 97 + 98 + 100, 97 + 98 + 102, 97 +
98 + 104, 97 + 98 + 105, 97 + 99 + 100, 97 + 99 + 102, 97 + 99 + 104, 97 + 99 + 105, 97 +
100 + 102, 97 + 100 + 104, 97 + 100 + 105, 97 + 102 + 104, 97 + 102 + 105, 97 + 104 + 105,
98 + 99 + 100, 98 + 99 + 102, 98 + 99 + 104, 98 + 99 + 105, 98 + 100 + 102, 98 + 100 + 104,
98 + 100 + 105, 98 + 102 + 104, 98 + 102 + 105, 98 + 104 + 105, 99 + 100 + 102, 99 + 100 +
104, 99 + 100 + 105, 99 + 102 + 104, 99 + 102 + 105, 99 + 104 + 105, 100 + 102 + 104, 100 +
102 + 105, 100 + 104 + 105, 102 + 104 + 105,

[0261] In some examples of any of the ABPCs described herein, a light chain variable domain includes a light chain variable domain that is at least 90% (e.g., at least 92%, at least 94%, at least 96%, at least 98%, at least 99%, or 100%) identical to SEQ ID NO: 120, where the light chain variable domain includes a histidine at any of the specific combinations of one or more amino acid positions in SEQ ID NO: 120 listed in Table 4.

TABLE 4
Exemplary Combinations of Amino Acid Positions in SEQ
ID NO: 120 that can be substituted with histidine

29 + 32, 29 + 34, 29 + 91, 29 + 92, 29 + 93, 29 + 94, 29 + 96, 32 + 34, 32 + 91, 32 + 92,
32 + 93, 32 + 94, 32 + 96, 34 + 91, 34 + 92, 34 + 93, 34 + 94, 34 + 96, 91 + 92, 91 + 93,
91 + 94, 91 + 96, 92 + 93, 92 + 94, 92 + 96, 93 + 94, 93 + 96, 94 + 96, 29 + 32 + 34,
29 + 32 + 91, 29 + 32 + 92, 29 + 32 + 93, 29 + 32 + 94, 29 + 32 + 96, 29 + 34 + 91, 29 + 34 +
92, 29 + 34 + 93, 29 + 34 + 94, 29 + 34 + 96, 29 + 91 + 92, 29 + 91 + 93, 29 + 91 + 94, 29 +
91 + 96, 29 + 92 + 93, 29 + 92 + 94, 29 + 92 + 96, 29 + 93 + 94, 29 + 93 + 96, 29 + 94 + 96,
32 + 34 + 91, 32 + 34 + 92, 32 + 34 + 93, 32 + 34 + 94, 32 + 34 + 96, 32 + 91 + 92, 32 + 91 +
93, 32 + 91 + 94, 32 + 91 + 96, 32 + 92 + 93, 32 + 92 + 94, 32 + 92 + 96, 32 + 93 + 94, 32 +
93 + 96, 32 + 94 + 96, 34 + 91 + 92, 34 + 91 + 93, 34 + 91 + 94, 34 + 91 + 96, 34 + 92 + 93,
34 + 92 + 94, 34 + 92 + 96, 34 + 93 + 94, 34 + 93 + 96, 34 + 94 + 96, 91 + 92 + 93, 91 + 92 +
94, 91 + 92 + 96, 91 + 93 + 94, 91 + 93 + 96, 91 + 94 + 96, 92 + 93 + 94, 92 + 93 + 96, 92 +
94 + 96, 93 + 94 + 96

[0262] In some examples of any of the ABPCs described herein, the first antigen-binding domain includes a heavy chain variable domain that is at least 90% (e.g., at least 92%, at least 94%, at least 96%, at least 98%, at least 99%, or 100%) identical to SEQ ID NO: 119, where the heavy chain variable domain includes a histidine at any of the specific combinations of one or more amino acid positions in SEQ ID NO: 119 listed in Table 3; and a light chain variable domain that that is at least 90% (e.g., at least 92%, at least 94%, at least 96%, at least 98%, at least 99%, or 100%) identical to SEQ ID NO: 120, where the light chain variable domain includes a histidine at any of the specific combinations of one or more amino acid positions in SEQ ID NO: 120 listed in Table 4.

[0263] In some examples of any of the ABPCs described herein, the first antigen-binding domain includes a heavy chain variable domain that is at least 90% (e.g., at least 92%, at least 94%, at least 96%, at least 98%, at least 99%, or 100%) identical to SEQ ID NO: 119, where the heavy chain variable domain includes a histidine at any of the specific combinations of one or more amino acid positions in SEQ ID NO: 119 listed in Table 3, and where the heavy chain variable domain includes an alanine at position 35 in SEQ ID NO: 119; and a light chain variable domain that that is at least 90% (e.g., at least 92%, at least 94%, at least 96%, at least 98%, at least 99%, or 100%) identical to SEQ ID NO: 120, where the light chain variable domain includes a histidine at any of the specific combinations of one or more amino acid positions in SEQ ID NO: 120 listed in Table 4.

[0264] In some examples of any of the ABPCs described herein, the first antigen-binding domain comprises a light chain variable domain that is at least 90% identical to SEQ ID NO: 120, wherein the light chain variable domain includes a histidine at position 29 in SEQ ID NO: 120; and a heavy chain variable domain that is at least 90% (e.g., at least 92%, at least 94%, at least 96%, at least 98%, at least 99%, or 100%) identical to SEQ ID NO: 119, where the heavy chain variable domain includes a histidine at any of the specific combinations of one or more amino acid positions in SEQ ID NO: 119 listed in Table 3.

[0265] In some examples of any of the ABPCs described herein, the first antigen-binding domain comprises a light chain variable domain comprising SEQ ID NO: 120, and a heavy chain variable domain that is at least 90% identical (e.g., at least 92%, at least 94%, at least 96%, at least 98%, at least 99%, or 100%) identical to SEQ ID NO: 119, where the heavy chain variable domain includes a histidine at any of the specific combinations of one or more (e.g., two, three, four, five, six, seven, eight, nine, or ten) amino acid positions in SEQ ID NO: 119 listed in Table 3.

[0266] In some examples of any of the ABPCs described herein, the first antigen-binding domain comprises a light chain variable domain that is at least 90% identical to SEQ ID NO: 120, wherein the light chain variable domain includes a histidine at position 32 in SEQ ID NO: 120; and a heavy chain variable domain that is at least 90% (e.g., at least 92%, at least 94%, at least 96%, at least 98%, at least 99%, or 100%) identical to SEQ ID NO: 119, where the heavy chain variable domain includes a histidine at any of the specific combinations of one or more amino acid positions in SEQ ID NO: 119 listed in Table 3.

[0267] In some examples of any of the ABPCs described herein, the first antigen-binding domain comprises a light chain variable domain that is at least 90% identical to SEQ ID NO: 120, wherein the light chain variable domain includes a histidine at position 34 in SEQ ID NO: 120; and a heavy chain variable domain that is at least 90% (e.g., at least 92%, at least 94%, at least 96%, at least 98%, at least 99%, or 100%) identical to SEQ ID NO: 119, where the heavy chain variable domain includes a histidine at any of the specific combinations of one or more amino acid positions in SEQ ID NO: 119 listed in Table 3.

[0268] In some examples of any of the ABPCs described herein, the first antigen-binding domain comprises a light chain variable domain that is at least 90% identical to SEQ ID NO: 120, wherein the light chain variable domain includes a histidine at position 91 in SEQ ID NO: 120; and a heavy chain variable domain that is at least 90% (e.g., at least 92%, at least 94%, at least 96%, at least 98%, at least 99%, or 100%) identical to SEQ ID NO: 119, where the heavy chain variable domain includes a histidine at any of the specific combinations of one or more amino acid positions in SEQ ID NO: 119 listed in Table 3.

[0269] In some examples of any of the ABPCs described herein, the first antigen-binding domain comprises a light chain variable domain that is at least 90% identical to SEQ ID NO: 120, wherein the light chain variable domain includes a histidine at position 92 in SEQ ID NO: 120; and a heavy chain variable domain that is at least 90% (e.g., at least 92%, at least 94%, at least 96%, at least 98%, at least 99%, or 100%) identical to SEQ ID NO: 119, where the heavy chain variable domain includes a histidine at any of the specific combinations of one or more amino acid positions in SEQ ID NO: 119 listed in Table 3.

[0270] In some examples of any of the ABPCs described herein, the first antigen-binding domain comprises a light chain variable domain that is at least 90% identical to SEQ ID NO: 120, wherein the light chain variable domain includes a histidine at position 93 in SEQ ID NO: 120; and a heavy chain variable domain that is at least 90% (e.g., at least 92%, at least 94%, at least 96%, at least 98%, at least 99%, or 100%) identical to SEQ ID NO: 119, where the heavy chain variable domain includes a histidine at any of the specific combinations of one or more amino acid positions in SEQ ID NO: 119 listed in Table 3.

[0271] In some examples of any of the ABPCs described herein, the first antigen-binding domain comprises a light chain variable domain that is at least 90% identical to SEQ ID NO: 120, wherein the light chain variable domain includes a histidine at position 94 in SEQ ID NO: 120; and a heavy chain variable domain that is at least 90% (e.g., at least 92%, at least 94%, at least 96%, at least 98%, at least 99%, or 100%) identical to SEQ ID NO: 119, where the heavy chain variable domain includes a histidine at any of the specific combinations of one or more amino acid positions in SEQ ID NO: 119 listed in Table 3.

[0272] In some examples of any of the ABPCs described herein, the first antigen-binding domain comprises a light chain variable domain that is at least 90% identical to SEQ ID NO: 120, wherein the light chain variable domain includes a histidine at position 96 in SEQ ID NO: 120; and a heavy chain variable domain that is at least 90% (e.g., at least 92%, at least 94%, at least 96%, at least 98%, at least 99%, or 100%) identical to SEQ ID NO: 119, where the heavy chain variable domain includes a histidine at any of the specific combinations of one or more amino acid positions in SEQ ID NO: 119 listed in Table 3.

[0273] In some examples of any of the ABPCs described herein, the first antigen-binding domain includes a heavy chain variable domain of SC16.4 with one or more (e.g., one, two, three, four, five, six, seven, eight, nine, ten, eleven, twelve, thirteen, fourteen, fifteen, sixteen, seventeen, eighteen, nineteen, or twenty) histidine(s) substituted with an alanine. In some examples of any of the ABPCs described herein, the first antigen-binding domain includes a light chain variable domain of SC16.4 with one or more (e.g., one, two, three, four, five, six, seven, eight, nine, ten, eleven, twelve, thirteen, fourteen, fifteen, sixteen, seventeen, eighteen, nineteen, or twenty) histidine(s) substituted with an alanine. In some examples of any of the ABPCs described herein, the first antigen-binding domain includes a heavy chain variable domain of SC16.4 with one or more (e.g., one, two, three, four, five, six, seven, eight, nine, ten, eleven, twelve, thirteen, fourteen, fifteen, sixteen, seventeen, eighteen, nineteen, or twenty) histidines substituted with an alanine; and a light chain variable domain of SC16.4 with one or more (e.g., one, two, three, four, five, six, seven, eight, nine, ten, eleven, twelve, thirteen, fourteen, fifteen, sixteen, seventeen, eighteen, nineteen, or twenty) histidine(s) substituted with an alanine. In some examples of any of the ABPCs described herein, the heavy chain variable domain of SC16.4 comprises SEQ ID NO: 119. In some examples of any of the ABPCs described herein, the light chain variable domain of SC16.4 comprises SEQ ID NO: 120.

[0274] In some examples of any of the ABPCs described herein, the first antigen-binding domain comprises a heavy chain variable domain comprising a CDR1, a CDR2, and a CDR3 of SEQ ID NO: 622, SEQ ID NO: 623, and SEQ ID NO: 624, respectively, with collectively a total of one or more (e.g., one, two, three, four, five, six, seven, eight, nine, or ten) histidine(s) in SEQ ID NOs: 622-624 substituted with an alanine. In some examples of any of the ABPCs described herein, the first antigen-binding domain comprises a light chain variable domain comprising a CDR1, a CDR2, and a CDR3 of SEQ ID NO: 625, SEQ ID NO: 626, and SEQ ID NO: 627, respectively, with collectively a total of one or more (e.g., one, two, three, four, five, six, seven, eight, nine, or ten) histidine(s) in SEQ ID NOs: 625-628 substituted with an alanine. In some examples of any of the ABPCs described herein, the first antigen-binding domain includes: a heavy chain variable domain comprising a CDR1, a CDR2, and a CDR3 of SEQ ID NO: 622, SEQ ID NO: 623, and SEQ ID NO: 624, respectively, with collectively a total of one or more (e.g., one, two, three, four, five, six, seven, eight, nine, or ten) histidine(s) in SEQ ID NOs: 622-624 substituted with an alanine; and a light chain variable domain comprising a CDR1, a CDR2, and a CDR3 of SEQ ID NO: 625, SEQ ID NO: 626, and SEQ ID NO: 627, respectively, with collectively a total of one or more (e.g., one, two, three, four, five, six, seven, eight, nine, or ten) histidine(s) in SEQ ID NOs: 625-627 substituted with an alanine.

[0275] In some examples of any of the ABPCs described herein, the first antigen-binding domain comprises a heavy chain variable domain of SEQ ID NO: 119, SEQ ID NO: 121, SEQ ID NO: 122, SEQ ID NO: 123, SEQ ID NO: 124, SEQ ID NO: 125, SEQ ID NO: 126, SEQ ID NO: 127, SEQ ID NO: 128, SEQ ID NO: 129, SEQ ID NO: 130, SEQ ID NO: 131, SEQ ID NO: 132, SEQ ID NO: 133, SEQ ID NO: 134, SEQ ID NO: 135, SEQ ID NO: 136, SEQ ID NO: 137, SEQ ID NO: 138, SEQ ID NO: 139, SEQ ID NO: 140, SEQ ID NO: 141, SEQ ID NO: 142, SEQ ID NO: 143, SEQ ID NO: 144, SEQ ID NO: 145, SEQ ID NO: 146, SEQ ID NO: 147, SEQ ID NO: 148, SEQ ID NO: 149, SEQ ID NO: 150, SEQ ID NO: 151, SEQ ID NO: 152, SEQ ID NO: 153, SEQ ID NO: 154, SEQ ID NO: 155, SEQ ID NO: 156, or SEQ ID NO: 157.

[0276] In some examples of any of the ABPCs described herein, the first antigen-binding domain includes a light chain variable domain of SEQ ID NO: 120, SEQ ID NO: 158, SEQ ID NO: 159, SEQ ID NO: 160, SEQ ID NO: 161, SEQ ID NO: 162, SEQ ID NO: 163, SEQ ID NO: 164, SEQ ID NO: 165, SEQ ID NO: 166, SEQ ID NO: 167, SEQ ID NO: 168, SEQ ID NO: 169, SEQ ID NO: 170, SEQ ID NO: 171, SEQ ID NO: 172, SEQ ID NO: 173, SEQ ID NO: 174, SEQ ID NO: 175, SEQ ID NO: 176, SEQ ID NO: 177, SEQ ID NO: 178, SEQ ID NO: 179, SEQ ID NO: 180, SEQ ID NO: 181, SEQ ID NO: 182, SEQ ID NO: 183, or SEQ ID NO: 184.

[0277] In some examples of any of the ABPCs described herein, the first antigen-binding domain includes a light chain variable domain comprising SEQ ID NO: 120, and a heavy chain variable domain comprising SEQ ID NO: 119, SEQ ID NO: 121, SEQ ID NO: 122, SEQ ID NO: 123, SEQ ID NO: 124, SEQ ID NO: 125, SEQ ID NO: 126, SEQ ID NO: 127, SEQ ID NO: 128, SEQ ID NO: 129, SEQ ID NO: 130, SEQ ID NO: 131, SEQ ID NO: 132, SEQ ID NO: 133, SEQ ID NO: 134, SEQ ID NO: 135, SEQ ID NO: 136, SEQ ID NO: 137, SEQ ID NO: 138, SEQ ID NO: 139, SEQ ID NO: 140, SEQ ID NO: 141, SEQ ID NO: 142, SEQ ID NO: 143, SEQ ID NO: 144, SEQ ID NO: 145, SEQ ID NO: 146, SEQ ID NO: 147, SEQ ID NO: 148, SEQ ID NO: 149, SEQ ID NO: 150, SEQ ID NO: 151, SEQ ID NO: 152, SEQ ID NO: 153, SEQ ID NO: 154, SEQ ID NO: 155, SEQ ID NO: 156, or SEQ ID NO: 157.

[0278] In some examples of any of the ABPCs described herein, the first antigen-binding domain includes a light chain variable domain comprising SEQ ID NO: 158, and a heavy chain variable domain comprising SEQ ID NO: 119, SEQ ID NO: 121, SEQ ID NO: 122, SEQ ID NO: 123, SEQ ID NO: 124, SEQ ID NO: 125, SEQ ID NO: 126, SEQ ID NO: 127, SEQ ID NO: 128, SEQ ID NO: 129, SEQ ID NO: 130, SEQ ID NO: 131, SEQ ID NO: 132, SEQ ID NO: 133, SEQ ID NO: 134, SEQ ID NO: 135, SEQ ID NO: 136, SEQ ID NO: 137, SEQ ID NO: 138, SEQ ID NO: 139, SEQ ID NO: 140, SEQ ID NO: 141, SEQ ID NO: 142, SEQ ID NO: 143, SEQ ID NO: 144, SEQ ID NO: 145, SEQ ID NO: 146, SEQ ID NO: 147, SEQ ID NO: 148, SEQ ID NO: 149, SEQ ID NO: 150, SEQ ID NO: 151, SEQ ID NO: 152, SEQ ID NO: 153, SEQ ID NO: 154, SEQ ID NO: 155, SEQ ID NO: 156, or SEQ ID NO: 157.

[0279] In some examples of any of the ABPCs described herein, the first antigen-binding domain includes a light chain variable domain comprising SEQ ID NO: 159, and a heavy chain variable domain comprising SEQ ID NO: 119, SEQ ID NO: 121, SEQ ID NO: 122, SEQ ID NO: 123, SEQ ID NO: 124, SEQ ID NO: 125, SEQ ID NO: 126, SEQ ID NO: 127, SEQ ID NO: 128, SEQ ID NO: 129, SEQ ID NO: 130, SEQ ID NO: 131, SEQ ID NO: 132, SEQ ID NO: 133, SEQ ID NO: 134, SEQ ID NO: 135, SEQ ID NO: 136, SEQ ID NO: 137, SEQ ID NO: 138, SEQ ID NO: 139, SEQ ID NO: 140, SEQ ID NO: 141, SEQ ID NO: 142, SEQ ID NO: 143, SEQ ID NO: 144, SEQ ID NO: 145, SEQ ID NO: 146, SEQ ID NO: 147, SEQ ID NO: 148, SEQ ID NO: 149, SEQ ID NO: 150, SEQ ID NO: 151, SEQ ID NO: 152, SEQ ID NO: 153, SEQ ID NO: 154, SEQ ID NO: 155, SEQ ID NO: 156, or SEQ ID NO: 157.

[0280] In some examples of any of the ABPCs described herein, the first antigen-binding domain includes a light chain variable domain comprising SEQ ID NO: 160, and a heavy chain variable domain comprising SEQ ID NO: 119, SEQ ID NO: 121, SEQ ID NO: 122, SEQ ID NO: 123, SEQ ID NO: 124, SEQ ID NO: 125, SEQ ID NO: 126, SEQ ID NO: 127, SEQ ID NO: 128, SEQ ID NO: 129, SEQ ID NO: 130, SEQ ID NO: 131, SEQ ID NO: 132, SEQ ID NO: 133, SEQ ID NO: 134, SEQ ID NO: 135, SEQ ID NO: 136, SEQ ID NO: 137, SEQ ID NO: 138, SEQ ID NO: 139, SEQ ID NO: 140, SEQ ID NO: 141, SEQ ID NO: 142, SEQ ID NO: 143, SEQ ID NO: 144, SEQ ID NO: 145, SEQ ID NO: 146, SEQ ID NO: 147, SEQ ID NO: 148, SEQ ID NO: 149, SEQ ID NO: 150, SEQ ID NO: 151, SEQ ID NO: 152, SEQ ID NO: 153, SEQ ID NO: 154, SEQ ID NO: 155, SEQ ID NO: 156, or SEQ ID NO: 157.

[0281] In some examples of any of the ABPCs described herein, the first antigen-binding domain includes a light chain variable domain comprising SEQ ID NO: 161, and a heavy chain variable domain comprising SEQ ID NO: 119, SEQ ID NO: 121, SEQ ID NO: 122, SEQ ID NO: 123, SEQ ID NO: 124, SEQ ID NO: 125, SEQ ID NO: 126, SEQ ID NO: 127, SEQ ID NO: 128, SEQ ID NO: 129, SEQ ID NO: 130, SEQ ID NO: 131, SEQ ID NO: 132, SEQ ID NO: 133, SEQ ID NO: 134, SEQ ID NO: 135, SEQ ID NO: 136, SEQ ID NO: 137, SEQ ID NO: 138, SEQ ID NO: 139, SEQ ID NO: 140, SEQ ID NO: 141, SEQ ID NO: 142, SEQ ID NO: 143, SEQ ID NO: 144, SEQ ID NO: 145, SEQ ID NO: 146, SEQ ID NO: 147, SEQ ID NO: 148, SEQ ID NO: 149, SEQ ID NO: 150, SEQ ID NO: 151, SEQ ID NO: 152, SEQ ID NO: 153, SEQ ID NO: 154, SEQ ID NO: 155, SEQ ID NO: 156, or SEQ ID NO: 157.

[0282] In some examples of any of the ABPCs described herein, the first antigen-binding domain includes a light chain variable domain comprising SEQ ID NO: 162, and a heavy chain variable domain comprising SEQ ID NO: 119, SEQ ID NO: 121, SEQ ID NO: 122, SEQ ID NO: 123, SEQ ID NO: 124, SEQ ID NO: 125, SEQ ID NO: 126, SEQ ID NO: 127, SEQ ID NO: 128, SEQ ID NO: 129, SEQ ID NO: 130, SEQ ID NO: 131, SEQ ID NO: 132, SEQ ID NO: 133, SEQ ID NO: 134, SEQ ID NO: 135, SEQ ID NO: 136, SEQ ID NO: 137, SEQ ID NO: 138, SEQ ID NO: 139, SEQ ID NO: 140, SEQ ID NO: 141, SEQ ID NO: 142, SEQ ID NO: 143, SEQ ID NO: 144, SEQ ID NO: 145, SEQ ID NO: 146, SEQ ID NO: 147, SEQ ID NO: 148, SEQ ID NO: 149, SEQ ID NO: 150, SEQ ID NO: 151, SEQ ID NO: 152, SEQ ID NO: 153, SEQ ID NO: 154, SEQ ID NO: 155, SEQ ID NO: 156, or SEQ ID NO: 157.

[0283] In some examples of any of the ABPCs described herein, the first antigen-binding domain includes a light chain variable domain comprising SEQ ID NO: 163, and a heavy chain variable domain comprising SEQ ID NO: 119, SEQ ID NO: 121, SEQ ID NO: 122, SEQ ID NO: 123, SEQ ID NO: 124, SEQ ID NO: 125, SEQ ID NO: 126, SEQ ID NO: 127, SEQ ID NO: 128, SEQ ID NO: 129, SEQ ID NO: 130, SEQ ID NO: 131, SEQ ID NO: 132, SEQ ID NO: 133, SEQ ID NO: 134, SEQ ID NO: 135, SEQ ID NO: 136, SEQ ID NO: 137, SEQ ID NO: 138, SEQ ID NO: 139, SEQ ID NO: 140, SEQ ID NO: 141, SEQ ID NO: 142, SEQ ID NO: 143, SEQ ID NO: 144, SEQ ID NO: 145, SEQ ID NO: 146, SEQ ID NO: 147, SEQ ID NO: 148, SEQ ID NO: 149, SEQ ID NO: 150, SEQ ID NO: 151, SEQ ID NO: 152, SEQ ID NO: 153, SEQ ID NO: 154, SEQ ID NO: 155, SEQ ID NO: 156, or SEQ ID NO: 157.

[0284] In some examples of any of the ABPCs described herein, the first antigen-binding domain includes a light chain variable domain comprising SEQ ID NO: 164, and a heavy chain variable domain comprising SEQ ID NO: 119, SEQ ID NO: 121, SEQ ID NO: 122, SEQ ID NO: 123, SEQ ID NO: 124, SEQ ID NO: 125, SEQ ID NO: 126, SEQ ID NO: 127, SEQ ID NO: 128, SEQ ID NO: 129, SEQ ID NO: 130, SEQ ID NO: 131, SEQ ID NO: 132, SEQ ID NO: 133, SEQ ID NO: 134, SEQ ID NO: 135, SEQ ID NO: 136, SEQ ID NO: 137, SEQ ID NO: 138, SEQ ID NO: 139, SEQ ID NO: 140, SEQ ID NO: 141, SEQ ID NO: 142, SEQ ID NO: 143, SEQ ID NO: 144, SEQ ID NO: 145, SEQ ID NO: 146, SEQ ID NO: 147, SEQ ID NO: 148, SEQ ID NO: 149, SEQ ID NO: 150, SEQ ID NO: 151, SEQ ID NO: 152, SEQ ID NO: 153, SEQ ID NO: 154, SEQ ID NO: 155, SEQ ID NO: 156, or SEQ ID NO: 157.

[0285] In some examples of any of the ABPCs described herein, the first antigen-binding domain includes a light chain variable domain comprising SEQ ID NO: 165, and a heavy chain variable domain comprising SEQ ID NO: 119, SEQ ID NO: 121, SEQ ID NO: 122, SEQ ID NO: 123, SEQ ID NO: 124, SEQ ID NO: 125, SEQ ID NO: 126, SEQ ID NO: 127, SEQ ID NO: 128, SEQ ID NO: 129, SEQ ID NO: 130, SEQ ID NO: 131, SEQ ID NO: 132, SEQ ID NO: 133, SEQ ID NO: 134, SEQ ID NO: 135, SEQ ID NO: 136, SEQ ID NO: 137, SEQ ID NO: 138, SEQ ID NO: 139, SEQ ID NO: 140, SEQ ID NO: 141, SEQ ID NO: 142, SEQ ID NO: 143, SEQ ID NO: 144, SEQ ID NO: 145, SEQ ID NO: 146, SEQ ID NO: 147, SEQ ID NO: 148, SEQ ID NO: 149, SEQ ID NO: 150, SEQ ID NO: 151, SEQ ID NO: 152, SEQ ID NO: 153, SEQ ID NO: 154, SEQ ID NO: 155, SEQ ID NO: 156, or SEQ ID NO: 157.

[0286] In some examples of any of the ABPCs described herein, the first antigen-binding domain includes a light chain variable domain comprising SEQ ID NO: 166, and a heavy chain variable domain comprising SEQ ID NO: 119, SEQ ID NO: 121, SEQ ID NO: 122, SEQ ID NO: 123, SEQ ID NO: 124, SEQ ID NO: 125, SEQ ID NO: 126, SEQ ID NO: 127, SEQ ID NO: 128, SEQ ID NO: 129, SEQ ID NO: 130, SEQ ID NO: 131, SEQ ID NO: 132, SEQ ID NO: 133, SEQ ID NO: 134, SEQ ID NO: 135, SEQ ID NO: 136, SEQ ID NO: 137, SEQ ID NO: 138, SEQ ID NO: 139, SEQ ID NO: 140, SEQ ID NO: 141, SEQ ID NO: 142, SEQ ID NO: 143, SEQ ID NO: 144, SEQ ID NO: 145, SEQ ID NO: 146, SEQ ID NO: 147, SEQ ID NO: 148, SEQ ID NO: 149, SEQ ID NO: 150, SEQ ID NO: 151, SEQ ID NO: 152, SEQ ID NO: 153, SEQ ID NO: 154, SEQ ID NO: 155, SEQ ID NO: 156, or SEQ ID NO: 157.

[0287] In some examples of any of the ABPCs described herein, the first antigen-binding domain includes a light chain variable domain comprising SEQ ID NO: 167, and a heavy chain variable domain comprising SEQ ID NO: 119, SEQ ID NO: 121, SEQ ID NO: 122, SEQ ID NO: 123, SEQ ID NO: 124, SEQ ID NO: 125, SEQ ID NO: 126, SEQ ID NO: 127, SEQ ID NO: 128, SEQ ID NO: 129, SEQ ID NO: 130, SEQ ID NO: 131, SEQ ID NO: 132, SEQ ID NO: 133, SEQ ID NO: 134, SEQ ID NO: 135, SEQ ID NO: 136, SEQ ID NO: 137, SEQ ID NO: 138, SEQ ID NO: 139, SEQ ID NO: 140, SEQ ID NO: 141, SEQ ID NO: 142, SEQ ID NO: 143, SEQ ID NO: 144, SEQ ID NO: 145, SEQ ID NO: 146, SEQ ID NO: 147, SEQ ID NO: 148, SEQ ID NO: 149, SEQ ID NO: 150, SEQ ID NO: 151, SEQ ID NO: 152, SEQ ID NO: 153, SEQ ID NO: 154, SEQ ID NO: 155, SEQ ID NO: 156, or SEQ ID NO: 157.

[0288] In some examples of any of the ABPCs described herein, the first antigen-binding domain includes a light chain variable domain comprising SEQ ID NO: 168, and a heavy chain variable domain comprising SEQ ID NO: 119, SEQ ID NO: 121, SEQ ID NO: 122, SEQ ID NO: 123, SEQ ID NO: 124, SEQ ID NO: 125, SEQ ID NO: 126, SEQ ID NO: 127, SEQ ID NO: 128, SEQ ID NO: 129, SEQ ID NO: 130, SEQ ID NO: 131, SEQ ID NO: 132, SEQ ID NO: 133, SEQ ID NO: 134, SEQ ID NO: 135, SEQ ID NO: 136, SEQ ID NO: 137, SEQ ID NO: 138, SEQ ID NO: 139, SEQ ID NO: 140, SEQ ID NO: 141, SEQ ID NO: 142, SEQ ID NO: 143, SEQ ID NO: 144, SEQ ID NO: 145, SEQ ID NO: 146, SEQ ID NO: 147, SEQ ID NO: 148, SEQ ID NO: 149, SEQ ID NO: 150, SEQ ID NO: 151, SEQ ID NO: 152, SEQ ID NO: 153, SEQ ID NO: 154, SEQ ID NO: 155, SEQ ID NO: 156, or SEQ ID NO: 157.

[0289] In some examples of any of the ABPCs described herein, the first antigen-binding domain includes a light chain variable domain comprising SEQ ID NO: 169, and a heavy chain variable domain comprising SEQ ID NO: 119, SEQ ID NO: 121, SEQ ID NO: 122, SEQ ID NO: 123, SEQ ID NO: 124, SEQ ID NO: 125, SEQ ID NO: 126, SEQ ID NO: 127, SEQ ID NO: 128, SEQ ID NO: 129, SEQ ID NO: 130, SEQ ID NO: 131, SEQ ID NO: 132, SEQ ID NO: 133, SEQ ID NO: 134, SEQ ID NO: 135, SEQ ID NO: 136, SEQ ID NO: 137, SEQ ID NO: 138, SEQ ID NO: 139, SEQ ID NO: 140, SEQ ID NO: 141, SEQ ID NO: 142, SEQ ID NO: 143, SEQ ID NO: 144, SEQ ID NO: 145, SEQ ID NO: 146, SEQ ID NO: 147, SEQ ID NO: 148, SEQ ID NO: 149, SEQ ID NO: 150, SEQ ID NO: 151, SEQ ID NO: 152, SEQ ID NO: 153, SEQ ID NO: 154, SEQ ID NO: 155, SEQ ID NO: 156, or SEQ ID NO: 157.

[0290] In some examples of any of the ABPCs described herein, the first antigen-binding domain includes a light chain variable domain comprising SEQ ID NO: 170, and a heavy chain variable domain comprising SEQ ID NO: 119, SEQ ID NO: 121, SEQ ID NO: 122, SEQ ID NO: 123, SEQ ID NO: 124, SEQ ID NO: 125, SEQ ID NO: 126, SEQ ID NO: 127, SEQ ID NO: 128, SEQ ID NO: 129, SEQ ID NO: 130, SEQ ID NO: 131, SEQ ID NO: 132, SEQ ID NO: 133, SEQ ID NO: 134, SEQ ID NO: 135, SEQ ID NO: 136, SEQ ID NO: 137, SEQ ID NO: 138, SEQ ID NO: 139, SEQ ID NO: 140, SEQ ID NO: 141, SEQ ID NO: 142, SEQ ID NO: 143, SEQ ID NO: 144, SEQ ID NO: 145, SEQ ID NO: 146, SEQ ID NO: 147, SEQ ID NO: 148, SEQ ID NO: 149, SEQ ID NO: 150, SEQ ID NO: 151, SEQ ID NO: 152, SEQ ID NO: 153, SEQ ID NO: 154, SEQ ID NO: 155, SEQ ID NO: 156, or SEQ ID NO: 157.

[0291] In some examples of any of the ABPCs described herein, the first antigen-binding domain includes a light chain variable domain comprising SEQ ID NO: 171, and a heavy chain variable domain comprising SEQ ID NO: 119, SEQ ID NO: 121, SEQ ID NO: 122, SEQ ID NO: 123, SEQ ID NO: 124, SEQ ID NO: 125, SEQ ID NO: 126, SEQ ID NO: 127, SEQ ID NO: 128, SEQ ID NO: 129, SEQ ID NO: 130, SEQ ID NO: 131, SEQ ID NO: 132, SEQ ID NO: 133, SEQ ID NO: 134, SEQ ID NO: 135, SEQ ID NO: 136, SEQ ID NO: 137, SEQ ID NO: 138, SEQ ID NO: 139, SEQ ID NO: 140, SEQ ID NO: 141, SEQ ID NO: 142, SEQ ID NO: 143, SEQ ID NO: 144, SEQ ID NO: 145, SEQ ID NO: 146, SEQ ID NO: 147, SEQ ID NO: 148, SEQ ID NO: 149, SEQ ID NO: 150, SEQ ID NO: 151, SEQ ID NO: 152, SEQ ID NO: 153, SEQ ID NO: 154, SEQ ID NO: 155, SEQ ID NO: 156, or SEQ ID NO: 157.

[0292] In some examples of any of the ABPCs described herein, the first antigen-binding domain includes a light chain variable domain comprising SEQ ID NO: 172, and a heavy chain variable domain comprising SEQ ID NO: 119, SEQ ID NO: 121, SEQ ID NO: 122, SEQ ID NO: 123, SEQ ID NO: 124, SEQ ID NO: 125, SEQ ID NO: 126, SEQ ID NO: 127, SEQ ID NO: 128, SEQ ID NO: 129, SEQ ID NO: 130, SEQ ID NO: 131, SEQ ID NO: 132, SEQ ID NO: 133, SEQ ID NO: 134, SEQ ID NO: 135, SEQ ID NO: 136, SEQ ID NO: 137, SEQ ID NO: 138, SEQ ID NO: 139, SEQ ID NO: 140, SEQ ID NO: 141, SEQ ID NO: 142, SEQ ID NO: 143, SEQ ID NO: 144, SEQ ID NO: 145, SEQ ID NO: 146, SEQ ID NO: 147, SEQ ID NO: 148, SEQ ID NO: 149, SEQ ID NO: 150, SEQ ID NO: 151, SEQ ID NO: 152, SEQ ID NO: 153, SEQ ID NO: 154, SEQ ID NO: 155, SEQ ID NO: 156, or SEQ ID NO: 157.

[0293] In some examples of any of the ABPCs described herein, the first antigen-binding domain includes a light chain variable domain comprising SEQ ID NO: 173, and a heavy chain variable domain comprising SEQ ID NO: 119, SEQ ID NO: 121, SEQ ID NO: 122, SEQ ID NO: 123, SEQ ID NO: 124, SEQ ID NO: 125, SEQ ID NO: 126, SEQ ID NO: 127, SEQ ID NO: 128, SEQ ID NO: 129, SEQ ID NO: 130, SEQ ID NO: 131, SEQ ID NO: 132, SEQ ID NO: 133, SEQ ID NO: 134, SEQ ID NO: 135, SEQ ID NO: 136, SEQ ID NO: 137, SEQ ID NO: 138, SEQ ID NO: 139, SEQ ID NO: 140, SEQ ID NO: 141, SEQ ID NO: 142, SEQ ID NO: 143, SEQ ID NO: 144, SEQ ID NO: 145, SEQ ID NO: 146, SEQ ID NO: 147, SEQ ID NO: 148, SEQ ID NO: 149, SEQ ID NO: 150, SEQ ID NO: 151, SEQ ID NO: 152, SEQ ID NO: 153, SEQ ID NO: 154, SEQ ID NO: 155, SEQ ID NO: 156, or SEQ ID NO: 157.

[0294] In some examples of any of the ABPCs described herein, the first antigen-binding domain includes a light chain variable domain comprising SEQ ID NO: 174, and a heavy chain variable domain comprising SEQ ID NO: 119, SEQ ID NO: 121, SEQ ID NO: 122, SEQ ID NO: 123, SEQ ID NO: 124, SEQ ID NO: 125, SEQ ID NO: 126, SEQ ID NO: 127, SEQ ID NO: 128, SEQ ID NO: 129, SEQ ID NO: 130, SEQ ID NO: 131, SEQ ID NO: 132, SEQ ID NO: 133, SEQ ID NO: 134, SEQ ID NO: 135, SEQ ID NO: 136, SEQ ID NO: 137, SEQ ID NO: 138, SEQ ID NO: 139, SEQ ID NO: 140, SEQ ID NO: 141, SEQ ID NO: 142, SEQ ID NO: 143, SEQ ID NO: 144, SEQ ID NO: 145, SEQ ID NO: 146, SEQ ID NO: 147, SEQ ID NO: 148, SEQ ID NO: 149, SEQ ID NO: 150, SEQ ID NO: 151, SEQ ID NO: 152, SEQ ID NO: 153, SEQ ID NO: 154, SEQ ID NO: 155, SEQ ID NO: 156, or SEQ ID NO: 157.

[0295] In some examples of any of the ABPCs described herein, the first antigen-binding domain includes a light chain variable domain comprising SEQ ID NO: 175, and a heavy chain variable domain comprising SEQ ID NO: 119, SEQ ID NO: 121, SEQ ID NO: 122, SEQ ID NO: 123, SEQ ID NO: 124, SEQ ID NO: 125, SEQ ID NO: 126, SEQ ID NO: 127, SEQ ID NO: 128, SEQ ID NO: 129, SEQ ID NO: 130, SEQ ID NO: 131, SEQ ID NO: 132, SEQ ID NO: 133, SEQ ID NO: 134, SEQ ID NO: 135, SEQ ID NO: 136, SEQ ID NO: 137, SEQ ID NO: 138, SEQ ID NO: 139, SEQ ID NO: 140, SEQ ID NO: 141, SEQ ID NO: 142, SEQ ID NO: 143, SEQ ID NO: 144, SEQ ID NO: 145, SEQ ID NO: 146, SEQ ID NO: 147, SEQ ID NO: 148, SEQ ID NO: 149, SEQ ID NO: 150, SEQ ID NO: 151, SEQ ID NO: 152, SEQ ID NO: 153, SEQ ID NO: 154, SEQ ID NO: 155, SEQ ID NO: 156, or SEQ ID NO: 157.

[0296] In some examples of any of the ABPCs described herein, the first antigen-binding domain includes a light chain variable domain comprising SEQ ID NO: 176, and a heavy chain variable domain comprising SEQ ID NO: 119, SEQ ID NO: 121, SEQ ID NO: 122, SEQ ID NO: 123, SEQ ID NO: 124, SEQ ID NO: 125, SEQ ID NO: 126, SEQ ID NO: 127, SEQ ID NO: 128, SEQ ID NO: 129, SEQ ID NO: 130, SEQ ID NO: 131, SEQ ID NO: 132, SEQ ID NO: 133, SEQ ID NO: 134, SEQ ID NO: 135, SEQ ID NO: 136, SEQ ID NO: 137, SEQ ID NO: 138, SEQ ID NO: 139, SEQ ID NO: 140, SEQ ID NO: 141, SEQ ID NO: 142, SEQ ID NO: 143, SEQ ID NO: 144, SEQ ID NO: 145, SEQ ID NO: 146, SEQ ID NO: 147, SEQ ID NO: 148, SEQ ID NO: 149, SEQ ID NO: 150, SEQ ID NO: 151, SEQ ID NO: 152, SEQ ID NO: 153, SEQ ID NO: 154, SEQ ID NO: 155, SEQ ID NO: 156, or SEQ ID NO: 157.

[0297] In some examples of any of the ABPCs described herein, the first antigen-binding domain includes a light chain variable domain comprising SEQ ID NO: 177, and a heavy chain variable domain comprising SEQ ID NO: 119, SEQ ID NO: 121, SEQ ID NO: 122, SEQ ID NO: 123, SEQ ID NO: 124, SEQ ID NO: 125, SEQ ID NO: 126, SEQ ID NO: 127, SEQ ID NO: 128, SEQ ID NO: 129, SEQ ID NO: 130, SEQ ID NO: 131, SEQ ID NO: 132, SEQ ID NO: 133, SEQ ID NO: 134, SEQ ID NO: 135, SEQ ID NO: 136, SEQ ID NO: 137, SEQ ID NO: 138, SEQ ID NO: 139, SEQ ID NO: 140, SEQ ID NO: 141, SEQ ID NO: 142, SEQ ID NO: 143, SEQ ID NO: 144, SEQ ID NO: 145, SEQ ID NO: 146, SEQ ID NO: 147, SEQ ID NO: 148, SEQ ID NO: 149, SEQ ID NO: 150, SEQ ID NO: 151, SEQ ID NO: 152, SEQ ID NO: 153, SEQ ID NO: 154, SEQ ID NO: 155, SEQ ID NO: 156, or SEQ ID NO: 157.

[0298] In some examples of any of the ABPCs described herein, the first antigen-binding domain includes a light chain variable domain comprising SEQ ID NO: 178, and a heavy chain variable domain comprising SEQ ID NO: 119, SEQ ID NO: 121, SEQ ID NO: 122, SEQ ID NO: 123, SEQ ID NO: 124, SEQ ID NO: 125, SEQ ID NO: 126, SEQ ID NO: 127, SEQ ID NO: 128, SEQ ID NO: 129, SEQ ID NO: 130, SEQ ID NO: 131, SEQ ID NO: 132, SEQ ID NO: 133, SEQ ID NO: 134, SEQ ID NO: 135, SEQ ID NO: 136, SEQ ID NO: 137, SEQ ID NO: 138, SEQ ID NO: 139, SEQ ID NO: 140, SEQ ID NO: 141, SEQ ID NO: 142, SEQ ID NO: 143, SEQ ID NO: 144, SEQ ID NO: 145, SEQ ID NO: 146, SEQ ID NO: 147, SEQ ID NO: 148, SEQ ID NO: 149, SEQ ID NO: 150, SEQ ID NO: 151, SEQ ID NO: 152, SEQ ID NO: 153, SEQ ID NO: 154, SEQ ID NO: 155, SEQ ID NO: 156, or SEQ ID NO: 157.

[0299] In some examples of any of the ABPCs described herein, the first antigen-binding domain includes a light chain variable domain comprising SEQ ID NO: 179, and a heavy chain variable domain comprising SEQ ID NO: 119, SEQ ID NO: 121, SEQ ID NO: 122, SEQ ID NO: 123, SEQ ID NO: 124, SEQ ID NO: 125, SEQ ID NO: 126, SEQ ID NO: 127, SEQ ID NO: 128, SEQ ID NO: 129, SEQ ID NO: 130, SEQ ID NO: 131, SEQ ID NO: 132, SEQ ID NO: 133, SEQ ID NO: 134, SEQ ID NO: 135, SEQ ID NO: 136, SEQ ID NO: 137, SEQ ID NO: 138, SEQ ID NO: 139, SEQ ID NO: 140, SEQ ID NO: 141, SEQ ID NO: 142, SEQ ID NO: 143, SEQ ID NO: 144, SEQ ID NO: 145, SEQ ID NO: 146, SEQ ID NO: 147, SEQ ID NO: 148, SEQ ID NO: 149, SEQ ID NO: 150, SEQ ID NO: 151, SEQ ID NO: 152, SEQ ID NO: 153, SEQ ID NO: 154, SEQ ID NO: 155, SEQ ID NO: 156, or SEQ ID NO: 157.

[0300] In some examples of any of the ABPCs described herein, the first antigen-binding domain includes a light chain variable domain comprising SEQ ID NO: 180, and a heavy chain variable domain comprising SEQ ID NO: 119, SEQ ID NO: 121, SEQ ID NO: 122, SEQ ID NO: 123, SEQ ID NO: 124, SEQ ID NO: 125, SEQ ID NO: 126, SEQ ID NO: 127, SEQ ID NO: 128, SEQ ID NO: 129, SEQ ID NO: 130, SEQ ID NO: 131, SEQ ID NO: 132, SEQ ID NO: 133, SEQ ID NO: 134, SEQ ID NO: 135, SEQ ID NO: 136, SEQ ID NO: 137, SEQ ID NO: 138, SEQ ID NO: 139, SEQ ID NO: 140, SEQ ID NO: 141, SEQ ID NO: 142, SEQ ID NO: 143, SEQ ID NO: 144, SEQ ID NO: 145, SEQ ID NO: 146, SEQ ID NO: 147, SEQ ID NO: 148, SEQ ID NO: 149, SEQ ID NO: 150, SEQ ID NO: 151, SEQ ID NO: 152, SEQ ID NO: 153, SEQ ID NO: 154, SEQ ID NO: 155, SEQ ID NO: 156, or SEQ ID NO: 157.

[0301] In some examples of any of the ABPCs described herein, the first antigen-binding domain includes a light chain variable domain comprising SEQ ID NO: 181, and a heavy chain variable domain comprising SEQ ID NO: 119, SEQ ID NO: 121, SEQ ID NO: 122, SEQ ID NO: 123, SEQ ID NO: 124, SEQ ID NO: 125, SEQ ID NO: 126, SEQ ID NO: 127, SEQ ID NO: 128, SEQ ID NO: 129, SEQ ID NO: 130, SEQ ID NO: 131, SEQ ID NO: 132, SEQ ID NO: 133, SEQ ID NO: 134, SEQ ID NO: 135, SEQ ID NO: 136, SEQ ID NO: 137, SEQ ID NO: 138, SEQ ID NO: 139, SEQ ID NO: 140, SEQ ID NO: 141, SEQ ID NO: 142, SEQ ID NO: 143, SEQ ID NO: 144, SEQ ID NO: 145, SEQ ID NO: 146, SEQ ID NO: 147, SEQ ID NO: 148, SEQ ID NO: 149, SEQ ID NO: 150, SEQ ID NO: 151, SEQ ID NO: 152, SEQ ID NO: 153, SEQ ID NO: 154, SEQ ID NO: 155, SEQ ID NO: 156, or SEQ ID NO: 157.

[0302] In some examples of any of the ABPCs described herein, the first antigen-binding domain includes a light chain variable domain comprising SEQ ID NO: 182, and a heavy chain variable domain comprising SEQ ID NO: 119, SEQ ID NO: 121, SEQ ID NO: 122, SEQ ID NO: 123, SEQ ID NO: 124, SEQ ID NO: 125, SEQ ID NO: 126, SEQ ID NO: 127, SEQ ID NO: 128, SEQ ID NO: 129, SEQ ID NO: 130, SEQ ID NO: 131, SEQ ID NO: 132, SEQ ID NO: 133, SEQ ID NO: 134, SEQ ID NO: 135, SEQ ID NO: 136, SEQ ID NO: 137, SEQ ID NO: 138, SEQ ID NO: 139, SEQ ID NO: 140, SEQ ID NO: 141, SEQ ID NO: 142, SEQ ID NO: 143, SEQ ID NO: 144, SEQ ID NO: 145, SEQ ID NO: 146, SEQ ID NO: 147, SEQ ID NO: 148, SEQ ID NO: 149, SEQ ID NO: 150, SEQ ID NO: 151, SEQ ID NO: 152, SEQ ID NO: 153, SEQ ID NO: 154, SEQ ID NO: 155, SEQ ID NO: 156, or SEQ ID NO: 157.

[0303] In some examples of any of the ABPCs described herein, the first antigen-binding domain includes a light chain variable domain comprising SEQ ID NO: 183, and a heavy chain variable domain comprising SEQ ID NO: 119, SEQ ID NO: 121, SEQ ID NO: 122, SEQ ID NO: 123, SEQ ID NO: 124, SEQ ID NO: 125, SEQ ID NO: 126, SEQ ID NO: 127, SEQ ID NO: 128, SEQ ID NO: 129, SEQ ID NO: 130, SEQ ID NO: 131, SEQ ID NO: 132, SEQ ID NO: 133, SEQ ID NO: 134, SEQ ID NO: 135, SEQ ID NO: 136, SEQ ID NO: 137, SEQ ID NO: 138, SEQ ID NO: 139, SEQ ID NO: 140, SEQ ID NO: 141, SEQ ID NO: 142, SEQ ID NO: 143, SEQ ID NO: 144, SEQ ID NO: 145, SEQ ID NO: 146, SEQ ID NO: 147, SEQ ID NO: 148, SEQ ID NO: 149, SEQ ID NO: 150, SEQ ID NO: 151, SEQ ID NO: 152, SEQ ID NO: 153, SEQ ID NO: 154, SEQ ID NO: 155, SEQ ID NO: 156, or SEQ ID NO: 157.

[0304] In some examples of any of the ABPCs described herein, the first antigen-binding domain includes a light chain variable domain comprising SEQ ID NO: 184, and a heavy chain variable domain comprising SEQ ID NO: 119, SEQ ID NO: 121, SEQ ID NO: 122, SEQ ID NO: 123, SEQ ID NO: 124, SEQ ID NO: 125, SEQ ID NO: 126, SEQ ID NO: 127, SEQ ID NO: 128, SEQ ID NO: 129, SEQ ID NO: 130, SEQ ID NO: 131, SEQ ID NO: 132, SEQ ID NO: 133, SEQ ID NO: 134, SEQ ID NO: 135, SEQ ID NO: 136, SEQ ID NO: 137, SEQ ID NO: 138, SEQ ID NO: 139, SEQ ID NO: 140, SEQ ID NO: 141, SEQ ID NO: 142, SEQ ID NO: 143, SEQ ID NO: 144, SEQ ID NO: 145, SEQ ID NO: 146, SEQ ID NO: 147, SEQ ID NO: 148, SEQ ID NO: 149, SEQ ID NO: 150, SEQ ID NO: 151, SEQ ID NO: 152, SEQ ID NO: 153, SEQ ID NO: 154, SEQ ID NO: 155, SEQ ID NO: 156, or SEQ ID NO: 157.

[0305] In some examples of any of the ABPCs described herein, the first antigen-binding domain includes a heavy chain variable domain comprising SEQ ID NO: 185, SEQ ID NO: 186, SEQ ID NO: 187, SEQ ID NO: 188, SEQ ID NO: 189, SEQ ID NO: 190, SEQ ID NO: 191, SEQ ID NO: 192, SEQ ID NO: 193, SEQ ID NO: 194, SEQ ID NO: 195, SEQ ID NO: 196, SEQ ID NO: 197, SEQ ID NO: 198, SEQ ID NO: 199, SEQ ID NO: 200, SEQ ID NO: 201, SEQ ID NO: 202, SEQ ID NO: 203, SEQ ID NO: 204, SEQ ID NO: 205, SEQ ID NO: 206, SEQ ID NO: 207, SEQ ID NO: 208, SEQ ID NO: 209, SEQ ID NO: 210, SEQ ID NO: 211, SEQ ID NO: 212, SEQ ID NO: 213, SEQ ID NO: 214, SEQ ID NO: 215, SEQ ID NO: 216, SEQ ID NO: 217, SEQ ID NO: 218, SEQ ID NO: 219, SEQ ID NO: 220, SEQ ID NO: 221, SEQ ID NO: 222, SEQ ID NO: 223, SEQ ID NO: 224, or SEQ ID NO: 225.

[0306] In some examples of any of ABPCs described herein, the first-antigen binding domain includes a heavy chain variable domain comprising SEQ ID NO: 185, and a light chain variable domain comprising SEQ ID NO: 120, SEQ ID NO: 158, SEQ ID NO: 159, SEQ ID NO: 160, SEQ ID NO: 161, SEQ ID NO: 162, SEQ ID NO: 163, SEQ ID NO: 164, SEQ ID NO: 165, SEQ ID NO: 166, SEQ ID NO: 167, SEQ ID NO: 168, SEQ ID NO: 169, SEQ ID NO: 170, SEQ ID NO: 171, SEQ ID NO: 172, SEQ ID NO: 173, SEQ ID NO: 174, SEQ ID NO: 175, SEQ ID NO: 176, SEQ ID NO: 177, SEQ ID NO: 178, SEQ ID NO: 179, SEQ ID NO: 180, SEQ ID NO: 181, SEQ ID NO: 182, SEQ ID NO: 183, or SEQ ID NO: 184.

[0307] In some examples of any of ABPCs described herein, the first-antigen binding domain includes a heavy chain variable domain comprising SEQ ID NO: 186, and a light chain variable domain comprising SEQ ID NO: 120, SEQ ID NO: 158, SEQ ID NO: 159, SEQ ID NO: 160, SEQ ID NO: 161, SEQ ID NO: 162, SEQ ID NO: 163, SEQ ID NO: 164, SEQ ID NO: 165, SEQ ID NO: 166, SEQ ID NO: 167, SEQ ID NO: 168, SEQ ID NO: 169, SEQ ID NO: 170, SEQ ID NO: 171, SEQ ID NO: 172, SEQ ID NO: 173, SEQ ID NO: 174, SEQ ID NO: 175, SEQ ID NO: 176, SEQ ID NO: 177, SEQ ID NO: 178, SEQ ID NO: 179, SEQ ID NO: 180, SEQ ID NO: 181, SEQ ID NO: 182, SEQ ID NO: 183, or SEQ ID NO: 184.

[0308] In some examples of any of ABPCs described herein, the first-antigen binding domain includes a heavy chain variable domain comprising SEQ ID NO: 187, and a light chain variable domain comprising SEQ ID NO: 120, SEQ ID NO: 158, SEQ ID NO: 159, SEQ ID NO: 160, SEQ ID NO: 161, SEQ ID NO: 162, SEQ ID NO: 163, SEQ ID NO: 164, SEQ ID NO: 165, SEQ ID NO: 166, SEQ ID NO: 167, SEQ ID NO: 168, SEQ ID NO: 169, SEQ ID NO: 170, SEQ ID NO: 171, SEQ ID NO: 172, SEQ ID NO: 173, SEQ ID NO: 174, SEQ ID NO: 175, SEQ ID NO: 176, SEQ ID NO: 177, SEQ ID NO: 178, SEQ ID NO: 179, SEQ ID NO: 180, SEQ ID NO: 181, SEQ ID NO: 182, SEQ ID NO: 183, or SEQ ID NO: 184.

[0309] In some examples of any of ABPCs described herein, the first-antigen binding domain includes a heavy chain variable domain comprising SEQ ID NO: 188, and a light chain variable domain comprising SEQ ID NO: 120, SEQ ID NO: 158, SEQ ID NO: 159, SEQ ID NO: 160, SEQ ID NO: 161, SEQ ID NO: 162, SEQ ID NO: 163, SEQ ID NO: 164, SEQ ID NO: 165, SEQ ID NO: 166, SEQ ID NO: 167, SEQ ID NO: 168, SEQ ID NO: 169, SEQ ID NO: 170, SEQ ID NO: 171, SEQ ID NO: 172, SEQ ID NO: 173, SEQ ID NO: 174, SEQ ID NO: 175, SEQ ID NO: 176, SEQ ID NO: 177, SEQ ID NO: 178, SEQ ID NO: 179, SEQ ID NO: 180, SEQ ID NO: 181, SEQ ID NO: 182, SEQ ID NO: 183, or SEQ ID NO: 184.

[0310] In some examples of any of ABPCs described herein, the first-antigen binding domain includes a heavy chain variable domain comprising SEQ ID NO: 189, and a light chain variable domain comprising SEQ ID NO: 120, SEQ ID NO: 158, SEQ ID NO: 159, SEQ ID NO: 160, SEQ ID NO: 161, SEQ ID NO: 162, SEQ ID NO: 163, SEQ ID NO: 164, SEQ ID NO: 165, SEQ ID NO: 166, SEQ ID NO: 167, SEQ ID NO: 168, SEQ ID NO: 169, SEQ ID NO: 170, SEQ ID NO: 171, SEQ ID NO: 172, SEQ ID NO: 173, SEQ ID NO: 174, SEQ ID NO: 175, SEQ ID NO: 176, SEQ ID NO: 177, SEQ ID NO: 178, SEQ ID NO: 179, SEQ ID NO: 180, SEQ ID NO: 181, SEQ ID NO: 182, SEQ ID NO: 183, or SEQ ID NO: 184.

[0311] In some examples of any of ABPCs described herein, the first-antigen binding domain includes a heavy chain variable domain comprising SEQ ID NO: 190, and a light chain variable domain comprising SEQ ID NO: 120, SEQ ID NO: 158, SEQ ID NO: 159, SEQ ID NO: 160, SEQ ID NO: 161, SEQ ID NO: 162, SEQ ID NO: 163, SEQ ID NO: 164, SEQ ID NO: 165, SEQ ID NO: 166, SEQ ID NO: 167, SEQ ID NO: 168, SEQ ID NO: 169, SEQ ID NO: 170, SEQ ID NO: 171, SEQ ID NO: 172, SEQ ID NO: 173, SEQ ID NO: 174, SEQ ID NO: 175, SEQ ID NO: 176, SEQ ID NO: 177, SEQ ID NO: 178, SEQ ID NO: 179, SEQ ID NO: 180, SEQ ID NO: 181, SEQ ID NO: 182, SEQ ID NO: 183, or SEQ ID NO: 184.

[0312] In some examples of any of ABPCs described herein, the first-antigen binding domain includes a heavy chain variable domain comprising SEQ ID NO: 191, and a light chain variable domain comprising SEQ ID NO: 120, SEQ ID NO: 158, SEQ ID NO: 159, SEQ ID NO: 160, SEQ ID NO: 161, SEQ ID NO: 162, SEQ ID NO: 163, SEQ ID NO: 164, SEQ ID NO: 165, SEQ ID NO: 166, SEQ ID NO: 167, SEQ ID NO: 168, SEQ ID NO: 169, SEQ ID NO: 170, SEQ ID NO: 171, SEQ ID NO: 172, SEQ ID NO: 173, SEQ ID NO: 174, SEQ ID NO: 175, SEQ ID NO: 176, SEQ ID NO: 177, SEQ ID NO: 178, SEQ ID NO: 179, SEQ ID NO: 180, SEQ ID NO: 181, SEQ ID NO: 182, SEQ ID NO: 183, or SEQ ID NO: 184.

[0313] In some examples of any of ABPCs described herein, the first-antigen binding domain includes a heavy chain variable domain comprising SEQ ID NO: 192, and a light chain variable domain comprising SEQ ID NO: 120, SEQ ID NO: 158, SEQ ID NO: 159, SEQ ID NO: 160, SEQ ID NO: 161, SEQ ID NO: 162, SEQ ID NO: 163, SEQ ID NO: 164, SEQ ID NO: 165, SEQ ID NO: 166, SEQ ID NO: 167, SEQ ID NO: 168, SEQ ID NO: 169, SEQ ID NO: 170, SEQ ID NO: 171, SEQ ID NO: 172, SEQ ID NO: 173, SEQ ID NO: 174, SEQ ID NO: 175, SEQ ID NO: 176, SEQ ID NO: 177, SEQ ID NO: 178, SEQ ID NO: 179, SEQ ID NO: 180, SEQ ID NO: 181, SEQ ID NO: 182, SEQ ID NO: 183, or SEQ ID NO: 184.

[0314] In some examples of any of ABPCs described herein, the first-antigen binding domain includes a heavy chain variable domain comprising SEQ ID NO: 193, and a light chain variable domain comprising SEQ ID NO: 120, SEQ ID NO: 158, SEQ ID NO: 159, SEQ ID NO: 160, SEQ ID NO: 161, SEQ ID NO: 162, SEQ ID NO: 163, SEQ ID NO: 164, SEQ ID NO: 165, SEQ ID NO: 166, SEQ ID NO: 167, SEQ ID NO: 168, SEQ ID NO: 169, SEQ ID NO: 170, SEQ ID NO: 171, SEQ ID NO: 172, SEQ ID NO: 173, SEQ ID NO: 174, SEQ ID NO: 175, SEQ ID NO: 176, SEQ ID NO: 177, SEQ ID NO: 178, SEQ ID NO: 179, SEQ ID NO: 180, SEQ ID NO: 181, SEQ ID NO: 182, SEQ ID NO: 183, or SEQ ID NO: 184.

[0315] In some examples of any of ABPCs described herein, the first-antigen binding domain includes a heavy chain variable domain comprising SEQ ID NO: 194, and a light chain variable domain comprising SEQ ID NO: 120, SEQ ID NO: 158, SEQ ID NO: 159, SEQ ID NO: 160, SEQ ID NO: 161, SEQ ID NO: 162, SEQ ID NO: 163, SEQ ID NO: 164, SEQ ID NO: 165, SEQ ID NO: 166, SEQ ID NO: 167, SEQ ID NO: 168, SEQ ID NO: 169, SEQ ID NO: 170, SEQ ID NO: 171, SEQ ID NO: 172, SEQ ID NO: 173, SEQ ID NO: 174, SEQ ID NO: 175, SEQ ID NO: 176, SEQ ID NO: 177, SEQ ID NO: 178, SEQ ID NO: 179, SEQ ID NO: 180, SEQ ID NO: 181, SEQ ID NO: 182, SEQ ID NO: 183, or SEQ ID NO: 184.

[0316] In some examples of any of ABPCs described herein, the first-antigen binding domain includes a heavy chain variable domain comprising SEQ ID NO: 195, and a light chain variable domain comprising SEQ ID NO: 120, SEQ ID NO: 158, SEQ ID NO: 159, SEQ ID NO: 160, SEQ ID NO: 161, SEQ ID NO: 162, SEQ ID NO: 163, SEQ ID NO: 164, SEQ ID NO: 165, SEQ ID NO: 166, SEQ ID NO: 167, SEQ ID NO: 168, SEQ ID NO: 169, SEQ ID NO: 170, SEQ ID NO: 171, SEQ ID NO: 172, SEQ ID NO: 173, SEQ ID NO: 174, SEQ ID NO: 175, SEQ ID NO: 176, SEQ ID NO: 177, SEQ ID NO: 178, SEQ ID NO: 179, SEQ ID NO: 180, SEQ ID NO: 181, SEQ ID NO: 182, SEQ ID NO: 183, or SEQ ID NO: 184.

[0317] In some examples of any of ABPCs described herein, the first-antigen binding domain includes a heavy chain variable domain comprising SEQ ID NO: 196, and a light chain variable domain comprising SEQ ID NO: 120, SEQ ID NO: 158, SEQ ID NO: 159, SEQ ID NO: 160, SEQ ID NO: 161, SEQ ID NO: 162, SEQ ID NO: 163, SEQ ID NO: 164, SEQ ID NO: 165, SEQ ID NO: 166, SEQ ID NO: 167, SEQ ID NO: 168, SEQ ID NO: 169, SEQ ID NO: 170, SEQ ID NO: 171, SEQ ID NO: 172, SEQ ID NO: 173, SEQ ID NO: 174, SEQ ID NO: 175, SEQ ID NO: 176, SEQ ID NO: 177, SEQ ID NO: 178, SEQ ID NO: 179, SEQ ID NO: 180, SEQ ID NO: 181, SEQ ID NO: 182, SEQ ID NO: 183, or SEQ ID NO: 184.

[0318] In some examples of any of ABPCs described herein, the first-antigen binding domain includes a heavy chain variable domain comprising SEQ ID NO: 197, and a light chain variable domain comprising SEQ ID NO: 120, SEQ ID NO: 158, SEQ ID NO: 159, SEQ ID NO: 160, SEQ ID NO: 161, SEQ ID NO: 162, SEQ ID NO: 163, SEQ ID NO: 164, SEQ ID NO: 165, SEQ ID NO: 166, SEQ ID NO: 167, SEQ ID NO: 168, SEQ ID NO: 169, SEQ ID NO: 170, SEQ ID NO: 171, SEQ ID NO: 172, SEQ ID NO: 173, SEQ ID NO: 174, SEQ ID NO: 175, SEQ ID NO: 176, SEQ ID NO: 177, SEQ ID NO: 178, SEQ ID NO: 179, SEQ ID NO: 180, SEQ ID NO: 181, SEQ ID NO: 182, SEQ ID NO: 183, or SEQ ID NO: 184.

[0319] In some examples of any of ABPCs described herein, the first-antigen binding domain includes a heavy chain variable domain comprising SEQ ID NO: 198, and a light chain variable domain comprising SEQ ID NO: 120, SEQ ID NO: 158, SEQ ID NO: 159, SEQ ID NO: 160, SEQ ID NO: 161, SEQ ID NO: 162, SEQ ID NO: 163, SEQ ID NO: 164, SEQ ID NO: 165, SEQ ID NO: 166, SEQ ID NO: 167, SEQ ID NO: 168, SEQ ID NO: 169, SEQ ID NO: 170, SEQ ID NO: 171, SEQ ID NO: 172, SEQ ID NO: 173, SEQ ID NO: 174, SEQ ID NO: 175, SEQ ID NO: 176, SEQ ID NO: 177, SEQ ID NO: 178, SEQ ID NO: 179, SEQ ID NO: 180, SEQ ID NO: 181, SEQ ID NO: 182, SEQ ID NO: 183, or SEQ ID NO: 184.

[0320] In some examples of any of ABPCs described herein, the first-antigen binding domain includes a heavy chain variable domain comprising SEQ ID NO: 199, and a light chain variable domain comprising SEQ ID NO: 120, SEQ ID NO: 158, SEQ ID NO: 159, SEQ ID NO: 160, SEQ ID NO: 161, SEQ ID NO: 162, SEQ ID NO: 163, SEQ ID NO: 164, SEQ ID NO: 165, SEQ ID NO: 166, SEQ ID NO: 167, SEQ ID NO: 168, SEQ ID NO: 169, SEQ ID NO: 170, SEQ ID NO: 171, SEQ ID NO: 172, SEQ ID NO: 173, SEQ ID NO: 174, SEQ ID NO: 175, SEQ ID NO: 176, SEQ ID NO: 177, SEQ ID NO: 178, SEQ ID NO: 179, SEQ ID NO: 180, SEQ ID NO: 181, SEQ ID NO: 182, SEQ ID NO: 183, or SEQ ID NO: 184.

[0321] In some examples of any of ABPCs described herein, the first-antigen binding domain includes a heavy chain variable domain comprising SEQ ID NO: 200, and a light chain variable domain comprising SEQ ID NO: 120, SEQ ID NO: 158, SEQ ID NO: 159, SEQ ID NO: 160, SEQ ID NO: 161, SEQ ID NO: 162, SEQ ID NO: 163, SEQ ID NO: 164, SEQ ID NO: 165, SEQ ID NO: 166, SEQ ID NO: 167, SEQ ID NO: 168, SEQ ID NO: 169, SEQ ID NO: 170, SEQ ID NO: 171, SEQ ID NO: 172, SEQ ID NO: 173, SEQ ID NO: 174, SEQ ID NO: 175, SEQ ID NO: 176, SEQ ID NO: 177, SEQ ID NO: 178, SEQ ID NO: 179, SEQ ID NO: 180, SEQ ID NO: 181, SEQ ID NO: 182, SEQ ID NO: 183, or SEQ ID NO: 184.

[0322] In some examples of any of ABPCs described herein, the first-antigen binding domain includes a heavy chain variable domain comprising SEQ ID NO: 201, and a light chain variable domain comprising SEQ ID NO: 120, SEQ ID NO: 158, SEQ ID NO: 159, SEQ ID NO: 160, SEQ ID NO: 161, SEQ ID NO: 162, SEQ ID NO: 163, SEQ ID NO: 164, SEQ ID NO: 165, SEQ ID NO: 166, SEQ ID NO: 167, SEQ ID NO: 168, SEQ ID NO: 169, SEQ ID NO: 170, SEQ ID NO: 171, SEQ ID NO: 172, SEQ ID NO: 173, SEQ ID NO: 174, SEQ ID NO: 175, SEQ ID NO: 176, SEQ ID NO: 177, SEQ ID NO: 178, SEQ ID NO: 179, SEQ ID NO: 180, SEQ ID NO: 181, SEQ ID NO: 182, SEQ ID NO: 183, or SEQ ID NO: 184.

[0323] In some examples of any of ABPCs described herein, the first-antigen binding domain includes a heavy chain variable domain comprising SEQ ID NO: 202, and a light chain variable domain comprising SEQ ID NO: 120, SEQ ID NO: 158, SEQ ID NO: 159, SEQ ID NO: 160, SEQ ID NO: 161, SEQ ID NO: 162, SEQ ID NO: 163, SEQ ID NO: 164, SEQ ID NO: 165, SEQ ID NO: 166, SEQ ID NO: 167, SEQ ID NO: 168, SEQ ID NO: 169, SEQ ID NO: 170, SEQ ID NO: 171, SEQ ID NO: 172, SEQ ID NO: 173, SEQ ID NO: 174, SEQ ID NO: 175, SEQ ID NO: 176, SEQ ID NO: 177, SEQ ID NO: 178, SEQ ID NO: 179, SEQ ID NO: 180, SEQ ID NO: 181, SEQ ID NO: 182, SEQ ID NO: 183, or SEQ ID NO: 184.

[0324] In some examples of any of ABPCs described herein, the first-antigen binding domain includes a heavy chain variable domain comprising SEQ ID NO: 203, and a light chain variable domain comprising SEQ ID NO: 120, SEQ ID NO: 158, SEQ ID NO: 159, SEQ ID NO: 160, SEQ ID NO: 161, SEQ ID NO: 162, SEQ ID NO: 163, SEQ ID NO: 164, SEQ ID NO: 165, SEQ ID NO: 166, SEQ ID NO: 167, SEQ ID NO: 168, SEQ ID NO: 169, SEQ ID NO: 170, SEQ ID NO: 171, SEQ ID NO: 172, SEQ ID NO: 173, SEQ ID NO: 174, SEQ ID NO: 175, SEQ ID NO: 176, SEQ ID NO: 177, SEQ ID NO: 178, SEQ ID NO: 179, SEQ ID NO: 180, SEQ ID NO: 181, SEQ ID NO: 182, SEQ ID NO: 183, or SEQ ID NO: 184.

[0325] In some examples of any of ABPCs described herein, the first-antigen binding domain includes a heavy chain variable domain comprising SEQ ID NO: 204, and a light chain variable domain comprising SEQ ID NO: 120, SEQ ID NO: 158, SEQ ID NO: 159, SEQ ID NO: 160, SEQ ID NO: 161, SEQ ID NO: 162, SEQ ID NO: 163, SEQ ID NO: 164, SEQ ID NO: 165, SEQ ID NO: 166, SEQ ID NO: 167, SEQ ID NO: 168, SEQ ID NO: 169, SEQ ID NO: 170, SEQ ID NO: 171, SEQ ID NO: 172, SEQ ID NO: 173, SEQ ID NO: 174, SEQ ID NO: 175, SEQ ID NO: 176, SEQ ID NO: 177, SEQ ID NO: 178, SEQ ID NO: 179, SEQ ID NO: 180, SEQ ID NO: 181, SEQ ID NO: 182, SEQ ID NO: 183, or SEQ ID NO: 184.

[0326] In some examples of any of ABPCs described herein, the first-antigen binding domain includes a heavy chain variable domain comprising SEQ ID NO: 205, and a light chain variable domain comprising SEQ ID NO: 120, SEQ ID NO: 158, SEQ ID NO: 159, SEQ ID NO: 160, SEQ ID NO: 161, SEQ ID NO: 162, SEQ ID NO: 163, SEQ ID NO: 164, SEQ ID NO: 165, SEQ ID NO: 166, SEQ ID NO: 167, SEQ ID NO: 168, SEQ ID NO: 169, SEQ ID NO: 170, SEQ ID NO: 171, SEQ ID NO: 172, SEQ ID NO: 173, SEQ ID NO: 174, SEQ ID NO: 175, SEQ ID NO: 176, SEQ ID NO: 177, SEQ ID NO: 178, SEQ ID NO: 179, SEQ ID NO: 180, SEQ ID NO: 181, SEQ ID NO: 182, SEQ ID NO: 183, or SEQ ID NO: 184.

[0327] In some examples of any of ABPCs described herein, the first-antigen binding domain includes a heavy chain variable domain comprising SEQ ID NO: 206, and a light chain variable domain comprising SEQ ID NO: 120, SEQ ID NO: 158, SEQ ID NO: 159, SEQ ID NO: 160, SEQ ID NO: 161, SEQ ID NO: 162, SEQ ID NO: 163, SEQ ID NO: 164, SEQ ID NO: 165, SEQ ID NO: 166, SEQ ID NO: 167, SEQ ID NO: 168, SEQ ID NO: 169, SEQ ID NO: 170, SEQ ID NO: 171, SEQ ID NO: 172, SEQ ID NO: 173, SEQ ID NO: 174, SEQ ID NO: 175, SEQ ID NO: 176, SEQ ID NO: 177, SEQ ID NO: 178, SEQ ID NO: 179, SEQ ID NO: 180, SEQ ID NO: 181, SEQ ID NO: 182, SEQ ID NO: 183, or SEQ ID NO: 184.

[0328] In some examples of any of ABPCs described herein, the first-antigen binding domain includes a heavy chain variable domain comprising SEQ ID NO: 207, and a light chain variable domain comprising SEQ ID NO: 120, SEQ ID NO: 158, SEQ ID NO: 159, SEQ ID NO: 160, SEQ ID NO: 161, SEQ ID NO: 162, SEQ ID NO: 163, SEQ ID NO: 164, SEQ ID NO: 165, SEQ ID NO: 166, SEQ ID NO: 167, SEQ ID NO: 168, SEQ ID NO: 169, SEQ ID NO: 170, SEQ ID NO: 171, SEQ ID NO: 172, SEQ ID NO: 173, SEQ ID NO: 174, SEQ ID NO: 175, SEQ ID NO: 176, SEQ ID NO: 177, SEQ ID NO: 178, SEQ ID NO: 179, SEQ ID NO: 180, SEQ ID NO: 181, SEQ ID NO: 182, SEQ ID NO: 183, or SEQ ID NO: 184.

[0329] In some examples of any of ABPCs described herein, the first-antigen binding domain includes a heavy chain variable domain comprising SEQ ID NO: 208, and a light chain variable domain comprising SEQ ID NO: 120, SEQ ID NO: 158, SEQ ID NO: 159, SEQ ID NO: 160, SEQ ID NO: 161, SEQ ID NO: 162, SEQ ID NO: 163, SEQ ID NO: 164, SEQ ID NO: 165, SEQ ID NO: 166, SEQ ID NO: 167, SEQ ID NO: 168, SEQ ID NO: 169, SEQ ID NO: 170, SEQ ID NO: 171, SEQ ID NO: 172, SEQ ID NO: 173, SEQ ID NO: 174, SEQ ID NO: 175, SEQ ID NO: 176, SEQ ID NO: 177, SEQ ID NO: 178, SEQ ID NO: 179, SEQ ID NO: 180, SEQ ID NO: 181, SEQ ID NO: 182, SEQ ID NO: 183, or SEQ ID NO: 184.

[0330] In some examples of any of ABPCs described herein, the first-antigen binding domain includes a heavy chain variable domain comprising SEQ ID NO: 209, and a light chain variable domain comprising SEQ ID NO: 120, SEQ ID NO: 158, SEQ ID NO: 159, SEQ ID NO: 160, SEQ ID NO: 161, SEQ ID NO: 162, SEQ ID NO: 163, SEQ ID NO: 164, SEQ ID NO: 165, SEQ ID NO: 166, SEQ ID NO: 167, SEQ ID NO: 168, SEQ ID NO: 169, SEQ ID NO: 170, SEQ ID NO: 171, SEQ ID NO: 172, SEQ ID NO: 173, SEQ ID NO: 174, SEQ ID NO: 175, SEQ ID NO: 176, SEQ ID NO: 177, SEQ ID NO: 178, SEQ ID NO: 179, SEQ ID NO: 180, SEQ ID NO: 181, SEQ ID NO: 182, SEQ ID NO: 183, or SEQ ID NO: 184.

[0331] In some examples of any of ABPCs described herein, the first-antigen binding domain includes a heavy chain variable domain comprising SEQ ID NO: 210, and a light chain variable domain comprising SEQ ID NO: 120, SEQ ID NO: 158, SEQ ID NO: 159, SEQ ID NO: 160, SEQ ID NO: 161, SEQ ID NO: 162, SEQ ID NO: 163, SEQ ID NO: 164, SEQ ID NO: 165, SEQ ID NO: 166, SEQ ID NO: 167, SEQ ID NO: 168, SEQ ID NO: 169, SEQ ID NO: 170, SEQ ID NO: 171, SEQ ID NO: 172, SEQ ID NO: 173, SEQ ID NO: 174, SEQ ID NO: 175, SEQ ID NO: 176, SEQ ID NO: 177, SEQ ID NO: 178, SEQ ID NO: 179, SEQ ID NO: 180, SEQ ID NO: 181, SEQ ID NO: 182, SEQ ID NO: 183, or SEQ ID NO: 184.

[0332] In some examples of any of ABPCs described herein, the first-antigen binding domain includes a heavy chain variable domain comprising SEQ ID NO: 211, and a light chain variable domain comprising SEQ ID NO: 120, SEQ ID NO: 158, SEQ ID NO: 159, SEQ ID NO: 160, SEQ ID NO: 161, SEQ ID NO: 162, SEQ ID NO: 163, SEQ ID NO: 164, SEQ ID NO: 165, SEQ ID NO: 166, SEQ ID NO: 167, SEQ ID NO: 168, SEQ ID NO: 169, SEQ ID NO: 170, SEQ ID NO: 171, SEQ ID NO: 172, SEQ ID NO: 173, SEQ ID NO: 174, SEQ ID NO: 175, SEQ ID NO: 176, SEQ ID NO: 177, SEQ ID NO: 178, SEQ ID NO: 179, SEQ ID NO: 180, SEQ ID NO: 181, SEQ ID NO: 182, SEQ ID NO: 183, or SEQ ID NO: 184.

[0333] In some examples of any of ABPCs described herein, the first-antigen binding domain includes a heavy chain variable domain comprising SEQ ID NO: 212, and a light chain variable domain comprising SEQ ID NO: 120, SEQ ID NO: 158, SEQ ID NO: 159, SEQ ID NO: 160, SEQ ID NO: 161, SEQ ID NO: 162, SEQ ID NO: 163, SEQ ID NO: 164, SEQ ID NO: 165, SEQ ID NO: 166, SEQ ID NO: 167, SEQ ID NO: 168, SEQ ID NO: 169, SEQ ID NO: 170, SEQ ID NO: 171, SEQ ID NO: 172, SEQ ID NO: 173, SEQ ID NO: 174, SEQ ID NO: 175, SEQ ID NO: 176, SEQ ID NO: 177, SEQ ID NO: 178, SEQ ID NO: 179, SEQ ID NO: 180, SEQ ID NO: 181, SEQ ID NO: 182, SEQ ID NO: 183, or SEQ ID NO: 184.

[0334] In some examples of any of ABPCs described herein, the first-antigen binding domain includes a heavy chain variable domain comprising SEQ ID NO: 213, and a light chain variable domain comprising SEQ ID NO: 120, SEQ ID NO: 158, SEQ ID NO: 159, SEQ ID NO: 160, SEQ ID NO: 161, SEQ ID NO: 162, SEQ ID NO: 163, SEQ ID NO: 164, SEQ ID NO: 165, SEQ ID NO: 166, SEQ ID NO: 167, SEQ ID NO: 168, SEQ ID NO: 169, SEQ ID NO: 170, SEQ ID NO: 171, SEQ ID NO: 172, SEQ ID NO: 173, SEQ ID NO: 174, SEQ ID NO: 175, SEQ ID NO: 176, SEQ ID NO: 177, SEQ ID NO: 178, SEQ ID NO: 179, SEQ ID NO: 180, SEQ ID NO: 181, SEQ ID NO: 182, SEQ ID NO: 183, or SEQ ID NO: 184.

[0335] In some examples of any of ABPCs described herein, the first-antigen binding domain includes a heavy chain variable domain comprising SEQ ID NO: 214, and a light chain variable domain comprising SEQ ID NO: 120, SEQ ID NO: 158, SEQ ID NO: 159, SEQ ID NO: 160, SEQ ID NO: 161, SEQ ID NO: 162, SEQ ID NO: 163, SEQ ID NO: 164, SEQ ID NO: 165, SEQ ID NO: 166, SEQ ID NO: 167, SEQ ID NO: 168, SEQ ID NO: 169, SEQ ID NO: 170, SEQ ID NO: 171, SEQ ID NO: 172, SEQ ID NO: 173, SEQ ID NO: 174, SEQ ID NO: 175, SEQ ID NO: 176, SEQ ID NO: 177, SEQ ID NO: 178, SEQ ID NO: 179, SEQ ID NO: 180, SEQ ID NO: 181, SEQ ID NO: 182, SEQ ID NO: 183, or SEQ ID NO: 184.

[0336] In some examples of any of ABPCs described herein, the first-antigen binding domain includes a heavy chain variable domain comprising SEQ ID NO: 215, and a light chain variable domain comprising SEQ ID NO: 120, SEQ ID NO: 158, SEQ ID NO: 159, SEQ ID NO: 160, SEQ ID NO: 161, SEQ ID NO: 162, SEQ ID NO: 163, SEQ ID NO: 164, SEQ ID NO: 165, SEQ ID NO: 166, SEQ ID NO: 167, SEQ ID NO: 168, SEQ ID NO: 169, SEQ ID NO: 170, SEQ ID NO: 171, SEQ ID NO: 172, SEQ ID NO: 173, SEQ ID NO: 174, SEQ ID NO: 175, SEQ ID NO: 176, SEQ ID NO: 177, SEQ ID NO: 178, SEQ ID NO: 179, SEQ ID NO: 180, SEQ ID NO: 181, SEQ ID NO: 182, SEQ ID NO: 183, or SEQ ID NO: 184.

[0337] In some examples of any of ABPCs described herein, the first-antigen binding domain includes a heavy chain variable domain comprising SEQ ID NO: 216, and a light chain variable domain comprising SEQ ID NO: 120, SEQ ID NO: 158, SEQ ID NO: 159, SEQ ID NO: 160, SEQ ID NO: 161, SEQ ID NO: 162, SEQ ID NO: 163, SEQ ID NO: 164, SEQ ID NO: 165, SEQ ID NO: 166, SEQ ID NO: 167, SEQ ID NO: 168, SEQ ID NO: 169, SEQ ID NO: 170, SEQ ID NO: 171, SEQ ID NO: 172, SEQ ID NO: 173, SEQ ID NO: 174, SEQ ID NO: 175, SEQ ID NO: 176, SEQ ID NO: 177, SEQ ID NO: 178, SEQ ID NO: 179, SEQ ID NO: 180, SEQ ID NO: 181, SEQ ID NO: 182, SEQ ID NO: 183, or SEQ ID NO: 184.

[0338] In some examples of any of ABPCs described herein, the first-antigen binding domain includes a heavy chain variable domain comprising SEQ ID NO: 217, and a light chain variable domain comprising SEQ ID NO: 120, SEQ ID NO: 158, SEQ ID NO: 159, SEQ ID NO: 160, SEQ ID NO: 161, SEQ ID NO: 162, SEQ ID NO: 163, SEQ ID NO: 164, SEQ ID NO: 165, SEQ ID NO: 166, SEQ ID NO: 167, SEQ ID NO: 168, SEQ ID NO: 169, SEQ ID NO: 170, SEQ ID NO: 171, SEQ ID NO: 172, SEQ ID NO: 173, SEQ ID NO: 174, SEQ ID NO: 175, SEQ ID NO: 176, SEQ ID NO: 177, SEQ ID NO: 178, SEQ ID NO: 179, SEQ ID NO: 180, SEQ ID NO: 181, SEQ ID NO: 182, SEQ ID NO: 183, or SEQ ID NO: 184.

[0339] In some examples of any of ABPCs described herein, the first-antigen binding domain includes a heavy chain variable domain comprising SEQ ID NO: 218, and a light chain variable domain comprising SEQ ID NO: 120, SEQ ID NO: 158, SEQ ID NO: 159, SEQ ID NO: 160, SEQ ID NO: 161, SEQ ID NO: 162, SEQ ID NO: 163, SEQ ID NO: 164, SEQ ID NO: 165, SEQ ID NO: 166, SEQ ID NO: 167, SEQ ID NO: 168, SEQ ID NO: 169, SEQ ID NO: 170, SEQ ID NO: 171, SEQ ID NO: 172, SEQ ID NO: 173, SEQ ID NO: 174, SEQ ID NO: 175, SEQ ID NO: 176, SEQ ID NO: 177, SEQ ID NO: 178, SEQ ID NO: 179, SEQ ID NO: 180, SEQ ID NO: 181, SEQ ID NO: 182, SEQ ID NO: 183, or SEQ ID NO: 184.

[0340] In some examples of any of ABPCs described herein, the first-antigen binding domain includes a heavy chain variable domain comprising SEQ ID NO: 219, and a light chain variable domain comprising SEQ ID NO: 120, SEQ ID NO: 158, SEQ ID NO: 159, SEQ ID NO: 160, SEQ ID NO: 161, SEQ ID NO: 162, SEQ ID NO: 163, SEQ ID NO: 164, SEQ ID NO: 165, SEQ ID NO: 166, SEQ ID NO: 167, SEQ ID NO: 168, SEQ ID NO: 169, SEQ ID NO: 170, SEQ ID NO: 171, SEQ ID NO: 172, SEQ ID NO: 173, SEQ ID NO: 174, SEQ ID NO: 175, SEQ ID NO: 176, SEQ ID NO: 177, SEQ ID NO: 178, SEQ ID NO: 179, SEQ ID NO: 180, SEQ ID NO: 181, SEQ ID NO: 182, SEQ ID NO: 183, or SEQ ID NO: 184.

[0341] In some examples of any of ABPCs described herein, the first-antigen binding domain includes a heavy chain variable domain comprising SEQ ID NO: 220, and a light chain variable domain comprising SEQ ID NO: 120, SEQ ID NO: 158, SEQ ID NO: 159, SEQ ID NO: 160, SEQ ID NO: 161, SEQ ID NO: 162, SEQ ID NO: 163, SEQ ID NO: 164, SEQ ID NO: 165, SEQ ID NO: 166, SEQ ID NO: 167, SEQ ID NO: 168, SEQ ID NO: 169, SEQ ID NO: 170, SEQ ID NO: 171, SEQ ID NO: 172, SEQ ID NO: 173, SEQ ID NO: 174, SEQ ID NO: 175, SEQ ID NO: 176, SEQ ID NO: 177, SEQ ID NO: 178, SEQ ID NO: 179, SEQ ID NO: 180, SEQ ID NO: 181, SEQ ID NO: 182, SEQ ID NO: 183, or SEQ ID NO: 184.

[0342] In some examples of any of ABPCs described herein, the first-antigen binding domain includes a heavy chain variable domain comprising SEQ ID NO: 221, and a light chain variable domain comprising SEQ ID NO: 120, SEQ ID NO: 158, SEQ ID NO: 159, SEQ ID NO: 160, SEQ ID NO: 161, SEQ ID NO: 162, SEQ ID NO: 163, SEQ ID NO: 164, SEQ ID NO: 165, SEQ ID NO: 166, SEQ ID NO: 167, SEQ ID NO: 168, SEQ ID NO: 169, SEQ ID NO: 170, SEQ ID NO: 171, SEQ ID NO: 172, SEQ ID NO: 173, SEQ ID NO: 174, SEQ ID NO: 175, SEQ ID NO: 176, SEQ ID NO: 177, SEQ ID NO: 178, SEQ ID NO: 179, SEQ ID NO: 180, SEQ ID NO: 181, SEQ ID NO: 182, SEQ ID NO: 183, or SEQ ID NO: 184.

[0343] In some examples of any of ABPCs described herein, the first-antigen binding domain includes a heavy chain variable domain comprising SEQ ID NO: 222, and a light chain variable domain comprising SEQ ID NO: 120, SEQ ID NO: 158, SEQ ID NO: 159, SEQ ID NO: 160, SEQ ID NO: 161, SEQ ID NO: 162, SEQ ID NO: 163, SEQ ID NO: 164, SEQ ID NO: 165, SEQ ID NO: 166, SEQ ID NO: 167, SEQ ID NO: 168, SEQ ID NO: 169, SEQ ID NO: 170, SEQ ID NO: 171, SEQ ID NO: 172, SEQ ID NO: 173, SEQ ID NO: 174, SEQ ID NO: 175, SEQ ID NO: 176, SEQ ID NO: 177, SEQ ID NO: 178, SEQ ID NO: 179, SEQ ID NO: 180, SEQ ID NO: 181, SEQ ID NO: 182, SEQ ID NO: 183, or SEQ ID NO: 184.

[0344] In some examples of any of ABPCs described herein, the first-antigen binding domain includes a heavy chain variable domain comprising SEQ ID NO: 223, and a light chain variable domain comprising SEQ ID NO: 120, SEQ ID NO: 158, SEQ ID NO: 159, SEQ ID NO: 160, SEQ ID NO: 161, SEQ ID NO: 162, SEQ ID NO: 163, SEQ ID NO: 164, SEQ ID NO: 165, SEQ ID NO: 166, SEQ ID NO: 167, SEQ ID NO: 168, SEQ ID NO: 169, SEQ ID NO: 170, SEQ ID NO: 171, SEQ ID NO: 172, SEQ ID NO: 173, SEQ ID NO: 174, SEQ ID NO: 175, SEQ ID NO: 176, SEQ ID NO: 177, SEQ ID NO: 178, SEQ ID NO: 179, SEQ ID NO: 180, SEQ ID NO: 181, SEQ ID NO: 182, SEQ ID NO: 183, or SEQ ID NO: 184.

[0345] In some examples of any of ABPCs described herein, the first-antigen binding domain includes a heavy chain variable domain comprising SEQ ID NO: 224, and a light chain variable domain comprising SEQ ID NO: 120, SEQ ID NO: 158, SEQ ID NO: 159, SEQ ID NO: 160, SEQ ID NO: 161, SEQ ID NO: 162, SEQ ID NO: 163, SEQ ID NO: 164, SEQ ID NO: 165, SEQ ID NO: 166, SEQ ID NO: 167, SEQ ID NO: 168, SEQ ID NO: 169, SEQ ID NO: 170, SEQ ID NO: 171, SEQ ID NO: 172, SEQ ID NO: 173, SEQ ID NO: 174, SEQ ID NO: 175, SEQ ID NO: 176, SEQ ID NO: 177, SEQ ID NO: 178, SEQ ID NO: 179, SEQ ID NO: 180, SEQ ID NO: 181, SEQ ID NO: 182, SEQ ID NO: 183, or SEQ ID NO: 184.

[0346] In some examples of any of ABPCs described herein, the first-antigen binding domain includes a heavy chain variable domain comprising SEQ ID NO: 225, and a light chain variable domain comprising SEQ ID NO: 120, SEQ ID NO: 158, SEQ ID NO: 159, SEQ ID NO: 160, SEQ ID NO: 161, SEQ ID NO: 162, SEQ ID NO: 163, SEQ ID NO: 164, SEQ ID NO: 165, SEQ ID NO: 166, SEQ ID NO: 167, SEQ ID NO: 168, SEQ ID NO: 169, SEQ ID NO: 170, SEQ ID NO: 171, SEQ ID NO: 172, SEQ ID NO: 173, SEQ ID NO: 174, SEQ ID NO: 175, SEQ ID NO: 176, SEQ ID NO: 177, SEQ ID NO: 178, SEQ ID NO: 179, SEQ ID NO: 180, SEQ ID NO: 181, SEQ ID NO: 182, SEQ ID NO: 183, or SEQ ID NO: 184.

[0347] In some examples of any of the ABPCs described herein, the first antigen-binding domain includes a light chain variable domain comprising SEQ ID NO: 226, SEQ ID NO: 227, SEQ ID NO: 228, SEQ ID NO: 229, SEQ ID NO: 230, SEQ ID NO: 231, SEQ ID NO: 232, SEQ ID NO: 233, SEQ ID NO: 234, and SEQ ID NO: 235.

[0348] In some examples of any of the ABPCs described herein, the first antigen-binding domain includes a light chain variable domain comprising SEQ IS NO: 226, and a heavy chain variable domain comprising SEQ ID NO: 119, SEQ ID NO: 121, SEQ ID NO: 122, SEQ ID NO: 123, SEQ ID NO: 124, SEQ ID NO: 125, SEQ ID NO: 126, SEQ ID NO: 127, SEQ ID NO: 128, SEQ ID NO: 129, SEQ ID NO: 130, SEQ ID NO: 131, SEQ ID NO: 132, SEQ ID NO: 133, SEQ ID NO: 134, SEQ ID NO: 135, SEQ ID NO: 136, SEQ ID NO: 137, SEQ ID NO: 138, SEQ ID NO: 139, SEQ ID NO: 140, SEQ ID NO: 141, SEQ ID NO: 142, SEQ ID NO: 143, SEQ ID NO: 144, SEQ ID NO: 145, SEQ ID NO: 146, SEQ ID NO: 147, SEQ ID NO: 148, SEQ ID NO: 149, SEQ ID NO: 150, SEQ ID NO: 151, SEQ ID NO: 152, SEQ ID NO: 153, SEQ ID NO: 154, SEQ ID NO: 155, SEQ ID NO: 156, or SEQ ID NO: 157.

[0349] In some examples of any of the ABPCs described herein, the first antigen-binding domain includes a light chain variable domain comprising SEQ IS NO: 227, and a heavy chain variable domain comprising SEQ ID NO: 119, SEQ ID NO: 121, SEQ ID NO: 122, SEQ ID NO: 123, SEQ ID NO: 124, SEQ ID NO: 125, SEQ ID NO: 126, SEQ ID NO: 127, SEQ ID NO: 128, SEQ ID NO: 129, SEQ ID NO: 130, SEQ ID NO: 131, SEQ ID NO: 132, SEQ ID NO: 133, SEQ ID NO: 134, SEQ ID NO: 135, SEQ ID NO: 136, SEQ ID NO: 137, SEQ ID NO: 138, SEQ ID NO: 139, SEQ ID NO: 140, SEQ ID NO: 141, SEQ ID NO: 142, SEQ ID NO: 143, SEQ ID NO: 144, SEQ ID NO: 145, SEQ ID NO: 146, SEQ ID NO: 147, SEQ ID NO: 148, SEQ ID NO: 149, SEQ ID NO: 150, SEQ ID NO: 151, SEQ ID NO: 152, SEQ ID NO: 153, SEQ ID NO: 154, SEQ ID NO: 155, SEQ ID NO: 156, or SEQ ID NO: 157.

[0350] In some examples of any of the ABPCs described herein, the first antigen-binding domain includes a light chain variable domain comprising SEQ IS NO: 228, and a heavy chain variable domain comprising SEQ ID NO: 119, SEQ ID NO: 121, SEQ ID NO: 122, SEQ ID NO: 123, SEQ ID NO: 124, SEQ ID NO: 125, SEQ ID NO: 126, SEQ ID NO: 127, SEQ ID NO: 128, SEQ ID NO: 129, SEQ ID NO: 130, SEQ ID NO: 131, SEQ ID NO: 132, SEQ ID NO: 133, SEQ ID NO: 134, SEQ ID NO: 135, SEQ ID NO: 136, SEQ ID NO: 137, SEQ ID NO: 138, SEQ ID NO: 139, SEQ ID NO: 140, SEQ ID NO: 141, SEQ ID NO: 142, SEQ ID NO: 143, SEQ ID NO: 144, SEQ ID NO: 145, SEQ ID NO: 146, SEQ ID NO: 147, SEQ ID NO: 148, SEQ ID NO: 149, SEQ ID NO: 150, SEQ ID NO: 151, SEQ ID NO: 152, SEQ ID NO: 153, SEQ ID NO: 154, SEQ ID NO: 155, SEQ ID NO: 156, or SEQ ID NO: 157.

[0351] In some examples of any of the ABPCs described herein, the first antigen-binding domain includes a light chain variable domain comprising SEQ IS NO: 229, and a heavy chain variable domain comprising SEQ ID NO: 119, SEQ ID NO: 121, SEQ ID NO: 122, SEQ ID NO: 123, SEQ ID NO: 124, SEQ ID NO: 125, SEQ ID NO: 126, SEQ ID NO: 127, SEQ ID NO: 128, SEQ ID NO: 129, SEQ ID NO: 130, SEQ ID NO: 131, SEQ ID NO: 132, SEQ ID NO: 133, SEQ ID NO: 134, SEQ ID NO: 135, SEQ ID NO: 136, SEQ ID NO: 137, SEQ ID NO: 138, SEQ ID NO: 139, SEQ ID NO: 140, SEQ ID NO: 141, SEQ ID NO: 142, SEQ ID NO: 143, SEQ ID NO: 144, SEQ ID NO: 145, SEQ ID NO: 146, SEQ ID NO: 147, SEQ ID NO: 148, SEQ ID NO: 149, SEQ ID NO: 150, SEQ ID NO: 151, SEQ ID NO: 152, SEQ ID NO: 153, SEQ ID NO: 154, SEQ ID NO: 155, SEQ ID NO: 156, or SEQ ID NO: 157.

[0352] In some examples of any of the ABPCs described herein, the first antigen-binding domain includes a light chain variable domain comprising SEQ IS NO: 230, and a heavy chain variable domain comprising SEQ ID NO: 119, SEQ ID NO: 121, SEQ ID NO: 122, SEQ ID NO: 123, SEQ ID NO: 124, SEQ ID NO: 125, SEQ ID NO: 126, SEQ ID NO: 127, SEQ ID NO: 128, SEQ ID NO: 129, SEQ ID NO: 130, SEQ ID NO: 131, SEQ ID NO: 132, SEQ ID NO: 133, SEQ ID NO: 134, SEQ ID NO: 135, SEQ ID NO: 136, SEQ ID NO: 137, SEQ ID NO: 138, SEQ ID NO: 139, SEQ ID NO: 140, SEQ ID NO: 141, SEQ ID NO: 142, SEQ ID NO: 143, SEQ ID NO: 144, SEQ ID NO: 145, SEQ ID NO: 146, SEQ ID NO: 147, SEQ ID NO: 148, SEQ ID NO: 149, SEQ ID NO: 150, SEQ ID NO: 151, SEQ ID NO: 152, SEQ ID NO: 153, SEQ ID NO: 154, SEQ ID NO: 155, SEQ ID NO: 156, or SEQ ID NO: 157.

[0353] In some examples of any of the ABPCs described herein, the first antigen-binding domain includes a light chain variable domain comprising SEQ IS NO: 231, and a heavy chain variable domain comprising SEQ ID NO: 119, SEQ ID NO: 121, SEQ ID NO: 122, SEQ ID NO: 123, SEQ ID NO: 124, SEQ ID NO: 125, SEQ ID NO: 126, SEQ ID NO: 127, SEQ ID NO: 128, SEQ ID NO: 129, SEQ ID NO: 130, SEQ ID NO: 131, SEQ ID NO: 132, SEQ ID NO: 133, SEQ ID NO: 134, SEQ ID NO: 135, SEQ ID NO: 136, SEQ ID NO: 137, SEQ ID NO: 138, SEQ ID NO: 139, SEQ ID NO: 140, SEQ ID NO: 141, SEQ ID NO: 142, SEQ ID NO: 143, SEQ ID NO: 144, SEQ ID NO: 145, SEQ ID NO: 146, SEQ ID NO: 147, SEQ ID NO: 148, SEQ ID NO: 149, SEQ ID NO: 150, SEQ ID NO: 151, SEQ ID NO: 152, SEQ ID NO: 153, SEQ ID NO: 154, SEQ ID NO: 155, SEQ ID NO: 156, or SEQ ID NO: 157.

[0354] In some examples of any of the ABPCs described herein, the first antigen-binding domain includes a light chain variable domain comprising SEQ IS NO: 232, and a heavy chain variable domain comprising SEQ ID NO: 119, SEQ ID NO: 121, SEQ ID NO: 122, SEQ ID NO: 123, SEQ ID NO: 124, SEQ ID NO: 125, SEQ ID NO: 126, SEQ ID NO: 127, SEQ ID NO: 128, SEQ ID NO: 129, SEQ ID NO: 130, SEQ ID NO: 131, SEQ ID NO: 132, SEQ ID NO: 133, SEQ ID NO: 134, SEQ ID NO: 135, SEQ ID NO: 136, SEQ ID NO: 137, SEQ ID NO: 138, SEQ ID NO: 139, SEQ ID NO: 140, SEQ ID NO: 141, SEQ ID NO: 142, SEQ ID NO: 143, SEQ ID NO: 144, SEQ ID NO: 145, SEQ ID NO: 146, SEQ ID NO: 147, SEQ ID NO: 148, SEQ ID NO: 149, SEQ ID NO: 150, SEQ ID NO: 151, SEQ ID NO: 152, SEQ ID NO: 153, SEQ ID NO: 154, SEQ ID NO: 155, SEQ ID NO: 156, or SEQ ID NO: 157.

[0355] In some examples of any of the ABPCs described herein, the first antigen-binding domain includes a light chain variable domain comprising SEQ IS NO: 233, and a heavy chain variable domain comprising SEQ ID NO: 119, SEQ ID NO: 121, SEQ ID NO: 122, SEQ ID NO: 123, SEQ ID NO: 124, SEQ ID NO: 125, SEQ ID NO: 126, SEQ ID NO: 127, SEQ ID NO: 128, SEQ ID NO: 129, SEQ ID NO: 130, SEQ ID NO: 131, SEQ ID NO: 132, SEQ ID NO: 133, SEQ ID NO: 134, SEQ ID NO: 135, SEQ ID NO: 136, SEQ ID NO: 137, SEQ ID NO: 138, SEQ ID NO: 139, SEQ ID NO: 140, SEQ ID NO: 141, SEQ ID NO: 142, SEQ ID NO: 143, SEQ ID NO: 144, SEQ ID NO: 145, SEQ ID NO: 146, SEQ ID NO: 147, SEQ ID NO: 148, SEQ ID NO: 149, SEQ ID NO: 150, SEQ ID NO: 151, SEQ ID NO: 152, SEQ ID NO: 153, SEQ ID NO: 154, SEQ ID NO: 155, SEQ ID NO: 156, or SEQ ID NO: 157.

[0356] In some examples of any of the ABPCs described herein, the first antigen-binding domain includes a light chain variable domain comprising SEQ IS NO: 234, and a heavy chain variable domain comprising SEQ ID NO: 119, SEQ ID NO: 121, SEQ ID NO: 122, SEQ ID NO: 123, SEQ ID NO: 124, SEQ ID NO: 125, SEQ ID NO: 126, SEQ ID NO: 127, SEQ ID NO: 128, SEQ ID NO: 129, SEQ ID NO: 130, SEQ ID NO: 131, SEQ ID NO: 132, SEQ ID NO: 133, SEQ ID NO: 134, SEQ ID NO: 135, SEQ ID NO: 136, SEQ ID NO: 137, SEQ ID NO: 138, SEQ ID NO: 139, SEQ ID NO: 140, SEQ ID NO: 141, SEQ ID NO: 142, SEQ ID NO: 143, SEQ ID NO: 144, SEQ ID NO: 145, SEQ ID NO: 146, SEQ ID NO: 147, SEQ ID NO: 148, SEQ ID NO: 149, SEQ ID NO: 150, SEQ ID NO: 151, SEQ ID NO: 152, SEQ ID NO: 153, SEQ ID NO: 154, SEQ ID NO: 155, SEQ ID NO: 156, or SEQ ID NO: 157.

[0357] In some examples of any of the ABPCs described herein, the first antigen-binding domain includes a light chain variable domain comprising SEQ IS NO: 235, and a heavy chain variable domain comprising SEQ ID NO: 119, SEQ ID NO: 121, SEQ ID NO: 122, SEQ ID NO: 123, SEQ ID NO: 124, SEQ ID NO: 125, SEQ ID NO: 126, SEQ ID NO: 127, SEQ ID NO: 128, SEQ ID NO: 129, SEQ ID NO: 130, SEQ ID NO: 131, SEQ ID NO: 132, SEQ ID NO: 133, SEQ ID NO: 134, SEQ ID NO: 135, SEQ ID NO: 136, SEQ ID NO: 137, SEQ ID NO: 138, SEQ ID NO: 139, SEQ ID NO: 140, SEQ ID NO: 141, SEQ ID NO: 142, SEQ ID NO: 143, SEQ ID NO: 144, SEQ ID NO: 145, SEQ ID NO: 146, SEQ ID NO: 147, SEQ ID NO: 148, SEQ ID NO: 149, SEQ ID NO: 150, SEQ ID NO: 151, SEQ ID NO: 152, SEQ ID NO: 153, SEQ ID NO: 154, SEQ ID NO: 155, SEQ ID NO: 156, or SEQ ID NO: 157.

[0358] In some examples of any of the ABPCs described herein, the first antigen-binding domain includes a light chain variable domain comprising SEQ ID NO: 226, SEQ ID NO: 227, SEQ ID NO: 228, SEQ ID NO: 229, SEQ ID NO: 230, SEQ ID NO: 231, SEQ ID NO: 232, SEQ ID NO: 233, SEQ ID NO: 234, and SEQ ID NO: 235 and heavy chain variable domain comprising SEQ ID NO: 185, SEQ ID NO: 186, SEQ ID NO: 187, SEQ ID NO: 188, SEQ ID NO: 189, SEQ ID NO: 190, SEQ ID NO: 191, SEQ ID NO: 192, SEQ ID NO: 193, SEQ ID NO: 194, SEQ ID NO: 195, SEQ ID NO: 196, SEQ ID NO: 197, SEQ ID NO: 198, SEQ ID NO: 199, SEQ ID NO: 200, SEQ ID NO: 201, SEQ ID NO: 202, SEQ ID NO: 203, SEQ ID NO: 204, SEQ ID NO: 205, SEQ ID NO: 206, SEQ ID NO: 207, SEQ ID NO: 208, SEQ ID NO: 209, SEQ ID NO: 210, SEQ ID NO: 211, SEQ ID NO: 212, SEQ ID NO: 213, SEQ ID NO: 214, SEQ ID NO: 215, SEQ ID NO: 216, SEQ ID NO: 217, SEQ ID NO: 218, SEQ ID NO: 219, SEQ ID NO: 220, SEQ ID NO: 221, SEQ ID NO: 222, SEQ ID NO: 223, SEQ ID NO: 224, or SEQ ID NO: 225.

[0359] In some examples of any of the ABPCs described herein, the first antigen-binding domain includes a light chain variable domain comprising SEQ ID NO: 163, SEQ ID NO: 166, and SEQ ID NO: 179. In some examples of any of the ABPCs described herein, the first antigen binding domain includes a heavy chain variable domain comprising SEQ ID NO: 127, SEQ ID NO: 138, SEQ ID NO: 141, SEQ ID NO: 143, SEQ ID NO: 150, SEQ ID NO: 151, or SEQ ID NO: 156. In some examples of any of the ABPCs described herein, the first antigen-binding domain includes a light chain variable domain comprising SEQ ID NO: 163, SEQ ID NO: 166, and SEQ ID NO: 179, and a heavy chain variable domain comprising SEQ ID NO: 127, SEQ ID NO: 138, SEQ ID NO: 141, SEQ ID NO: 143, SEQ ID NO: 150, SEQ ID NO: 151, or SEQ ID NO: 156.

[0360] In some examples of any of the ABPCs described herein, the first antigen-binding domain includes a light chain variable domain comprising SEQ ID NO: 163, and a heavy chain variable domain comprising SEQ ID NO: 127, SEQ ID NO: 138, SEQ ID NO: 141, SEQ ID NO: 143, SEQ ID NO: 150, SEQ ID NO: 151, SEQ ID NO: 156.

[0361] In some examples of any of the ABPCs described herein, the first antigen-binding domain includes a light chain variable domain comprising SEQ ID NO: 166, and a heavy chain variable domain comprising SEQ ID NO: 127, SEQ ID NO: 138, SEQ ID NO: 141, SEQ ID NO: 143, SEQ ID NO: 150, SEQ ID NO: 151, SEQ ID NO: 156.

[0362] In some examples of any of the ABPCs described herein, the first antigen-binding domain includes a light chain variable domain comprising SEQ ID NO: 179, and a heavy chain variable domain comprising SEQ ID NO: 127, SEQ ID NO: 138, SEQ ID NO: 141, SEQ ID NO: 143, SEQ ID NO: 150, SEQ ID NO: 151, SEQ ID NO: 156.

[0363] In some examples of any of the ABPCs described herein, the first antigen-binding domain includes a heavy chain variable domain of SC16.13 with one or more (e.g., one, two, three, four, five, six, seven, eight, nine, ten, eleven, twelve, thirteen, fourteen, fifteen, sixteen, seventeen, eighteen, nineteen, or twenty) amino acids substituted with a histidine. In some examples of any of the ABPCs described herein, the first antigen-binding domain includes a light chain variable domain of SC16.13 with one or more (e.g., one, two, three, four, five, six, seven, eight, nine, ten, eleven, twelve, thirteen, fourteen, fifteen, sixteen, seventeen, eighteen, nineteen, or twenty) amino acids substituted with a histidine. In some examples of any of the ABPCs described herein, the first antigen-binding domain includes a heavy chain variable domain of SC16.13 with one or more (e.g., one, two, three, four, five, six, seven, eight, nine, ten, eleven, twelve, thirteen, fourteen, fifteen, sixteen, seventeen, eighteen, nineteen, or twenty) amino acids substituted with a histidine; and a light chain variable domain of SC16.13 with one or more (e.g., one, two, three, four, five, six, seven, eight, nine, ten, eleven, twelve, thirteen, fourteen, fifteen, sixteen, seventeen, eighteen, nineteen, or twenty) amino acids substituted with a histidine. In some examples of any of the ABPCs described herein, the heavy chain variable domain of SC16.13 comprises SEQ ID NO: 236. In some examples of any of the ABPCs described herein, the light chain variable domain of SC16.13 comprises SEQ ID NO: 237.

[0364] In some examples of any of the ABPCs described herein, the first antigen-binding domain comprises a heavy chain variable domain comprising a CDR1, a CDR2, and a CDR3 of SEQ ID NO: 628, SEQ ID NO: 629, and SEQ ID NO: 630, respectively, with collectively a total of one or more (e.g., one, two, three, four, five, six, seven, eight, nine, or ten) amino acid positions in SEQ ID NOs: 628-630 substituted with a histidine. In some examples of any of the ABPCs described herein, the first antigen-binding domain comprises a light chain variable domain comprising a CDR1, a CDR2, and a CDR3 of SEQ ID NO: 631, SEQ ID NO: 632, and SEQ ID NO: 633, respectively, with collectively a total of one or more (e.g., one, two, three, four, five, six, seven, eight, nine, or ten) amino acid positions in SEQ ID NOs: 631-633 substituted with a histidine. In some examples of any of the ABPCs described herein, the first antigen-binding domain includes: a heavy chain variable domain comprising a CDR1, a CDR2, and a CDR3 of SEQ ID NO: 628, SEQ ID NO: 629, and SEQ ID NO: 630, respectively, with collectively a total of one or more (e.g., one, two, three, four, five, six, seven, eight, nine, or ten) amino acid positions in SEQ ID NOs: 628-630 substituted with a histidine; and a light chain variable domain comprising a CDR1, a CDR2, and a CDR3 of SEQ ID NO: 631, SEQ ID NO: 632, and SEQ ID NO: 633, respectively, with collectively a total of one or more (e.g., one, two, three, four, five, six, seven, eight, nine, or ten) amino acid positions in SEQ ID NOs: 631-633 substituted with a histidine.

[0365] In some examples of any of the ABPCs described herein, the first antigen-binding domain includes a heavy chain variable domain that is at least 90% (e.g., at least 92%, at least 94%, at least 96%, at least 98%, at least 99%, or 100%) identical to SEQ ID NO: 236, where the heavy chain variable domain includes a histidine at one or more (e.g., one, two, three, four, five, six, seven, eight, nine, ten, eleven, twelve, thirteen, fourteen, fifteen, sixteen, seventeen, eighteen, nineteen, or twenty) amino acid positions in SEQ ID NO: 236 selected from the group consisting of: 27, 29, 31, 33, 34, 35, 36, 37, 54, 55, 56, 58, 60, 98, 100, 102, 106, 108, and 110. In some examples of any of the ABPCs described herein, the first antigen-binding domain includes a light chain variable domain that is at least 90% (e.g., at least 92%, at least 94%, at least 96%, at least 98%, at least 99%, or 100%) identical to SEQ ID NO: 237, where the light chain variable domain includes a histidine at one or more (e.g., one, two, three, four, five, six, seven, eight, nine, ten, eleven, twelve, thirteen, fourteen, fifteen, sixteen, seventeen, eighteen, nineteen, or twenty) amino acid positions in SEQ ID NO: 237 selected from the group consisting of: 25, 29, 32, 33, 49, 50, 90, 91, 93, and 95. In some examples of any of the ABPCs described herein the first antigen-binding domain includes: a heavy chain variable domain that is at least 90% (e.g., at least 92%, at least 94%, at least 96%, at least 98%, at least 99%, or 100%) identical to SEQ ID NO: 236, where the heavy chain variable domain includes a histidine at one or more (e.g., one, two, three, four, five, six, seven, eight, nine, ten, eleven, twelve, thirteen, fourteen, fifteen, sixteen, seventeen, eighteen, nineteen, or twenty) amino acid positions in SEQ ID NO: 236 selected from the group consisting of: 27, 29, 31, 33, 34, 35, 36, 37, 54, 55, 56, 58, 60, 98, 100, 102, 106, 108, and 110, and a light chain variable domain that is at least 90% (e.g., at least 92%, at least 94%, at least 96%, at least 98%, at least 99%, or 100%) identical to SEQ ID NO: 237, where the light chain variable domain includes a histidine at one or more (e.g., one, two, three, four, five, six, seven, eight, nine, ten, eleven, twelve, thirteen, fourteen, fifteen, sixteen, seventeen, eighteen, nineteen, or twenty) amino acid positions in SEQ ID NO: 237 selected from the group consisting of: 25, 29, 32, 33, 49, 50, 90, 91, 93, and 95.

[0366] In some examples of any of the ABPCs described herein, a heavy chain variable domain includes a heavy chain variable domain that is at least 90% (e.g., at least 92%, at least 94%, at least 96%, at least 98%, at least 99%, or 100%) identical to SEQ ID NO: 236, where the heavy chain variable domain includes a histidine at any of the specific combinations of one or more amino acid positions in SEQ ID NO: 236 listed in Table 5.

[0367] In some examples of any of the ABPCs described herein, the first antigen-binding domain includes a heavy chain variable domain that is at least 90% (e.g., at least 92%, at least 94%, at least 96%, at least 98%, at least 99%, or 100%) identical to SEQ ID NO: 236, where the heavy chain variable domain includes an alanine at position 52 in SEQ ID NO: 236.

[0368] In some examples of any of the ABPCs described herein the first antigen-binding domain includes: a heavy chain variable domain that is at least 90% (e.g., at least 92%, at least 94%, at least 96%, at least 98%, at least 99%, or 100%) identical to SEQ ID NO: 236, where the heavy chain variable domain includes an alanine at position 52 in SEQ ID NO: 236, and a light chain variable domain that is at least 90% (e.g., at least 92%, at least 94%, at least 96%, at least 98%, at least 99%, or 100%) identical to SEQ ID NO: 237, where the light chain variable domain includes a histidine at one or more (e.g., one, two, three, four, five, six, seven, eight, nine, ten, eleven, twelve, thirteen, fourteen, fifteen, sixteen, seventeen, eighteen, nineteen, or twenty) amino acid positions in SEQ ID NO: 237 selected from the group consisting of: 25, 29, 32, 33, 49, 50, 90, 91, 93, and 95.

[0369] In some examples of any of the ABPCs described herein, the first antigen-binding domain includes a heavy chain variable domain that is at least 90% (e.g., at least 92%, at least 94%, at least 96%, at least 98%, at least 99%, or 100%) identical to SEQ ID NO: 236, where the heavy chain variable domain includes a histidine at one or more (e.g., one, two, three, four, five, six, seven, eight, nine, ten, eleven, twelve, thirteen, fourteen, fifteen, sixteen, seventeen, eighteen, nineteen, or twenty) amino acid positions in SEQ ID NO: 236 selected from the group consisting of: 27, 29, 31, 33, 34, 35, 36, 37, 54, 55, 56, 58, 60, 98, 100, 102, 106, 108, and 110, and where the heavy chain variable domain includes an alanine at position 52 in SEQ ID NO: 236. In some examples of any of the ABPCs described herein the first antigen-binding domain includes: a heavy chain variable domain that is at least 90% (e.g., at least 92%, at least 94%, at least 96%, at least 98%, at least 99%, or 100%) identical to SEQ ID NO: 236, where the heavy chain variable domain includes a histidine at one or more (e.g., one, two, three, four, five, six, seven, eight, nine, ten, eleven, twelve, thirteen, fourteen, fifteen, sixteen, seventeen, eighteen, nineteen, or twenty) amino acid positions in SEQ ID NO: 236 selected from the group consisting of: 27, 29, 31, 33, 34, 35, 36, 37, 54, 55, 56, 58, 60, 98, 100, 102, 106, 108, and 110, and where the heavy chain variable domain includes an alanine at position 52 in SEQ ID NO: 236, and a light chain variable domain that is at least 90% (e.g., at least 92%, at least 94%, at least 96%, at least 980, at least 990, or 100) identical to SEQ ID NO: 237, where the light chain variable domain includes a histidine at one or more (e.g., one, two, three, four, five, six, seven, eight, nine, ten, eleven, twelve, thirteen, fourteen, fifteen, sixteen, seventeen, eighteen, nineteen, or twenty) amino acid positions in SEQ ID NO: 237 selected from the group consisting of: 25, 29, 32, 33, 49, 50, 90, 91, 93, and 95.

[0370] In some examples of any of the ABPCs described herein, a heavy chain variable domain includes a heavy chain variable domain that is at least 90% (e.g., at least 92%, at least 94% at least 96%, at least 98%, at least 99% or 100%) identical to SEQ ID NO: 237, where the heavy chain variable domain includes a histidine at any of the specific combinations of one or more amino acid positions in SEQ ID NO: 237 listed in Table 5 and where the heavy chain variable domain includes an alanine at position 52 of SEQ ID NO: 237.

TABLE 5
Exemplary Combinations of Amino Acid Positions in SEQ
ID NO: 236 that can be substituted with histidine

27 + 29, 27 + 31, 27 + 33, 27 + 34, 27 + 35, 27 + 36, 27 + 37, 27 + 54, 27 + 55, 27 + 56, 27 +
58, 27 + 60, 27 + 98, 27 + 100, 27 + 102, 27 + 106, 27 + 108, 27 + 110, 29 + 31,29 + 33,29 +
34, 29 + 35, 29 + 36, 29 + 37, 29 + 54, 29 + 55, 29 + 56, 29 + 58, 29 + 60, 29 + 98, 29 + 100,
29 + 102, 29 + 106, 29 + 108, 29 + 110, 31 + 33, 31 + 34, 31 + 35, 31 + 36, 31 + 37, 31 + 54,
31 + 55, 31 + 56, 31 + 58, 31 + 60, 31 + 98, 31 + 100, 31 + 102, 31 + 106, 31 + 108, 31 + 110,
33 + 34, 33 + 35, 33 + 36, 33 + 37, 33 + 54, 33 + 55, 33 + 56, 33 + 58, 33 + 60, 33 + 98, 33 +
100, 33 + 102, 33 + 106, 33 + 108, 33 + 110, 34 + 35, 34 + 36, 34 + 37, 34 + 54, 34 + 55, 34 +
56, 34 + 58, 34 + 60, 34 + 98, 34 + 100, 34 + 102, 34 + 106, 34 + 108, 34 + 110, 35 + 36, 35 +
37, 35 + 54, 35 + 55, 35 + 56, 35 + 58, 35 + 60, 35 + 98, 35 + 100, 35 + 102, 35 + 106, 35 +
108, 35 + 110, 36 + 37, 36 + 54, 36 + 55, 36 + 56, 36 + 58, 36 + 60, 36 + 98, 36 + 100, 36 +
102, 36 + 106, 36 + 108, 36 + 110, 37 + 54, 37 + 55, 37 + 56, 37 + 58, 37 + 60, 37 + 98, 37 +
100, 37 + 102, 37 + 106, 37 + 108, 37 + 110, 54 + 55, 54 + 56, 54 + 58, 54 + 60, 54 + 98, 54 +
100, 54 + 102, 54 + 106, 54 + 108, 54 + 110, 55 + 56, 55 + 58, 55 + 60, 55 + 98, 55 + 100, 55 +
102, 55 + 106, 55 + 108, 55 + 110, 56 + 58, 56 + 60, 56 + 98, 56 + 100, 56 + 102, 56 + 106,
56 + 108, 56 + 110, 58 + 60, 58 + 98, 58 + 100, 58 + 102, 58 + 106, 58 + 108, 58 + 110, 60 +
98, 60 + 100, 60 + 102, 60 + 106, 60 + 108, 60 + 110, 98 + 100, 98 + 102, 98 + 106, 98 + 108,
98 + 110, 100 + 102, 100 + 106, 100 + 108, 100 + 110, 102 + 106, 102 + 108, 102 + 110, 106 +
108, 106 + 110, 108 + 110, 27 + 29 + 31, 27 + 29 + 33, 27 + 29 + 34, 27 + 29 + 35, 27 + 29 +
36, 27 + 29 + 37, 27 + 29 + 54, 27 + 29 + 55, 27 + 29 + 56, 27 + 29 + 58, 27 + 29 + 60, 27 +
29 + 98, 27 + 29 + 100, 27 + 29 + 102, 27 + 29 + 106, 27 + 29 + 108, 27 + 29 + 110, 27 + 31 +
33, 27 + 31 + 34, 27 + 31 + 35, 27 + 31 + 36, 27 + 31 + 37, 27 + 31 + 54, 27 + 31 + 55, 27 +
31 + 56, 27 + 31 + 58, 27 + 31 + 60, 27 + 31 + 98, 27 + 31 + 100, 27 + 31 + 102, 27 + 31 +
106, 27 + 31 + 108, 27 + 31 + 110, 27 + 33 + 34, 27 + 33 + 35, 27 + 33 + 36, 27 + 33 + 37, 27 +
33 + 54, 27 + 33 + 55, 27 + 33 + 56, 27 + 33 + 58, 27 + 33 + 60, 27 + 33 + 98, 27 + 33 +
100, 27 + 33 + 102, 27 + 33 + 106, 27 + 33 + 108, 27 + 33 + 110, 27 + 34 + 35, 27 + 34 + 36,
27 + 34 + 37, 27 + 34 + 54, 27 + 34 + 55, 27 + 34 + 56, 27 + 34 + 58, 27 + 34 + 60, 27 + 34 +
98, 27 + 34 + 100, 27 + 34 + 102, 27 + 34 + 106, 27 + 34 + 108, 27 + 34 + 110, 27 + 35 + 36,
27 + 35 + 37, 27 + 35 + 54, 27 + 35 + 55, 27 + 35 + 56, 27 + 35 + 58, 27 + 35 + 60, 27 + 35 +
98, 27 + 35 + 100, 27 + 35 + 102, 27 + 35 + 106, 27 + 35 + 108, 27 + 35 + 110, 27 + 36 + 37,
27 + 36 + 54, 27 + 36 + 55, 27 + 36 + 56, 27 + 36 + 58, 27 + 36 + 60, 27 + 36 + 98, 27 + 36 +
100, 27 + 36 + 102, 27 + 36 + 106, 27 + 36 + 108, 27 + 36 + 110, 27 + 37 + 54, 27 + 37 + 55,
27 + 37 + 56, 27 + 37 + 58, 27 + 37 + 60, 27 + 37 + 98, 27 + 37 + 100, 27 + 37 + 102, 27 + 37 +
106, 27 + 37 + 108, 27 + 37 + 110, 27 + 54 + 55, 27 + 54 + 56, 27 + 54 + 58, 27 + 54 + 60,
27 + 54 + 98, 27 + 54 + 100, 27 + 54 + 102, 27 + 54 + 106, 27 + 54 + 108, 27 + 54 + 110, 27 +
55 + 56, 27 + 55 + 58, 27 + 55 + 60, 27 + 55 + 98, 27 + 55 + 100, 27 + 55 + 102, 27 + 55 +
106, 27 + 55 + 108, 27 + 55 + 110, 27 + 56 + 58, 27 + 56 + 60, 27 + 56 + 98, 27 + 56 + 100,
27 + 56 + 102, 27 + 56 + 106, 27 + 56 + 108, 27 + 56 + 110, 27 + 58 + 60, 27 + 58 + 98, 27 +
58 + 100, 27 + 58 + 102, 27 + 58 + 106, 27 + 58 + 108, 27 + 58 + 110, 27 + 60 + 98, 27 + 60 +
100, 27 + 60 + 102, 27 + 60 + 106, 27 + 60 + 108, 27 + 60 + 110, 27 + 98 + 100, 27 + 98 +
102, 27 + 98 + 106, 27 + 98 + 108, 27 + 98 + 110, 27 + 100 + 102, 27 + 100 + 106, 27 + 100 +
108, 27 + 100 + 110, 27 + 102 + 106, 27 + 102 + 108, 27 + 102 + 110, 27 + 106 + 108, 27 +
106 + 110, 27 + 108 + 110, 29 + 31 + 33, 29 + 31 + 34, 29 + 31 + 35, 29 + 31 + 36, 29 + 31 +
37, 29 + 31 + 54, 29 + 31 + 55, 29 + 31 + 56, 29 + 31 + 58, 29 + 31 + 60, 29 + 31 + 98, 29 +
31 + 100, 29 + 31 + 102, 29 + 31 + 106, 29 + 31 + 108, 29 + 31 + 110, 29 + 33 + 34, 29 + 33 +
35, 29 + 33 + 36, 29 + 33 + 37, 29 + 33 + 54, 29 + 33 + 55, 29 + 33 + 56, 29 + 33 + 58, 29 +
33 + 60, 29 + 33 + 98, 29 + 33 + 100, 29 + 33 + 102, 29 + 33 + 106, 29 + 33 + 108, 29 + 33 +
110, 29 + 34 + 35, 29 + 34 + 36, 29 + 34 + 37, 29 + 34 + 54, 29 + 34 + 55, 29 + 34 + 56, 29 +
34 + 58, 29 + 34 + 60, 29 + 34 + 98, 29 + 34 + 100, 29 + 34 + 102, 29 + 34 + 106, 29 + 34 +
108, 29 + 34 + 110, 29 + 35 + 36, 29 + 35 + 37, 29 + 35 + 54, 29 + 35 + 55, 29 + 35 + 56, 29 +
35 + 58, 29 + 35 + 60, 29 + 35 + 98, 29 + 35 + 100, 29 + 35 + 102, 29 + 35 + 106, 29 + 35 +
108, 29 + 35 + 110, 29 + 36 + 37, 29 + 36 + 54, 29 + 36 + 55, 29 + 36 + 56, 29 + 36 + 58, 29 +
36 + 60, 29 + 36 + 98, 29 + 36 + 100, 29 + 36 + 102, 29 + 36 + 106, 29 + 36 + 108, 29 + 36 +
110, 29 + 37 + 54, 29 + 37 + 55, 29 + 37 + 56, 29 + 37 + 58, 29 + 37 + 60, 29 + 37 + 98, 29 +
37 + 100, 29 + 37 + 102, 29 + 37 + 106, 29 + 37 + 108, 29 + 37 + 110, 29 + 54 + 55, 29 +
54 + 56, 29 + 54 + 58, 29 + 54 + 60, 29 + 54 + 98, 29 + 54 + 100, 29 + 54 + 102, 29 + 54 +
106, 29 + 54 + 108, 29 + 54 + 110, 29 + 55 + 56, 29 + 55 + 58, 29 + 55 + 60, 29 + 55 + 98, 29 +
55 + 100, 29 + 55 + 102, 29 + 55 + 106, 29 + 55 + 108, 29 + 55 + 110, 29 + 56 + 58, 29 +
56 + 60, 29 + 56 + 98, 29 + 56 + 100, 29 + 56 + 102, 29 + 56 + 106, 29 + 56 + 108, 29 + 56 +
110, 29 + 58 + 60, 29 + 58 + 98, 29 + 58 + 100, 29 + 58 + 102, 29 + 58 + 106, 29 + 58 + 108,
29 + 58 + 110, 29 + 60 + 98, 29 + 60 + 100, 29 + 60 + 102, 29 + 60 + 106, 29 + 60 + 108, 29 +
60 + 110, 29 + 98 + 100, 29 + 98 + 102, 29 + 98 + 106, 29 + 98 + 108, 29 + 98 + 110, 29 +
100 + 102, 29 + 100 + 106, 29 + 100 + 108, 29 + 100 + 110, 29 + 102 + 106, 29 + 102 + 108,
29 + 102 + 110, 29 + 106 + 108, 29 + 106 + 110, 29 + 108 + 110, 31 + 33 + 34, 31 + 33 + 35,
31 + 33 + 36, 31 + 33 + 37, 31 + 33 + 54, 31 + 33 + 55, 31 + 33 + 56, 31 + 33 + 58, 31 + 33 +
60, 31 + 33 + 98, 31 + 33 + 100, 31 + 33 + 102, 31 + 33 + 106, 31 + 33 + 108, 31 + 33 + 110,
31 + 34 + 35, 31 + 34 + 36, 31 + 34 + 37, 31 + 34 + 54, 31 + 34 + 55, 31 + 34 + 56, 31 + 34 +
58, 31 + 34 + 60, 31 + 34 + 98, 31 + 34 + 100, 31 + 34 + 102, 31 + 34 + 106, 31 + 34 + 108,
31 + 34 + 110, 31 + 35 + 36, 31 + 35 + 37, 31 + 35 + 54, 31 + 35 + 55, 31 + 35 + 56, 31 + 35 +
58, 31 + 35 + 60, 31 + 35 + 98, 31 + 35 + 100, 31 + 35 + 102, 31 + 35 + 106, 31 + 35 + 108,
31 + 35 + 110, 31 + 36 + 37, 31 + 36 + 54, 31 + 36 + 55, 31 + 36 + 56, 31 + 36 + 58, 31 + 36 +
60, 31 + 36 + 98, 31 + 36 + 100, 31 + 36 + 102, 31 + 36 + 106, 31 + 36 + 108, 31 + 36 +
110, 31 + 37 + 54, 31 + 37 + 55, 31 + 37 + 56, 31 + 37 + 58, 31 + 37 + 60, 31 + 37 + 98, 31 +
37 + 100, 31 + 37 + 102, 31 + 37 + 106, 31 + 37 + 108, 31 + 37 + 110, 31 + 54 + 55, 31 + 54 +
56, 31 + 54 + 58, 31 + 54 + 60, 31 + 54 + 98, 31 + 54 + 100, 31 + 54 + 102, 31 + 54 + 106,
31 + 54 + 108, 31 + 54 + 110, 31 + 55 + 56, 31 + 55 + 58, 31 + 55 + 60, 31 + 55 + 98, 31 + 55 +
100, 31 + 55 + 102, 31 + 55 + 106, 31 + 55 + 108, 31 + 55 + 110, 31 + 56 + 58, 31 + 56 +
60, 31 + 56 + 98, 31 + 56 + 100, 31 + 56 + 102, 31 + 56 + 106, 31 + 56 + 108, 31 + 56 + 110,
31 + 58 + 60, 31 + 58 + 98, 31 + 58 + 100, 31 + 58 + 102, 31 + 58 + 106, 31 + 58 + 108, 31 +
58 + 110, 31 + 60 + 98, 31 + 60 + 100, 31 + 60 + 102, 31 + 60 + 106, 31 + 60 + 108, 31 + 60 +
110, 31 + 98 + 100, 31 + 98 + 102, 31 + 98 + 106, 31 + 98 + 108, 31 + 98 + 110, 31 + 100 +
102, 31 + 100 + 106, 31 + 100 + 108, 31 + 100 + 110, 31 + 102 + 106, 31 + 102 + 108, 31 +
102 + 110, 31 + 106 + 108, 31 + 106 + 110, 31 + 108 + 110, 33 + 34 + 35, 33 + 34 + 36, 33 +
34 + 37, 33 + 34 + 54, 33 + 34 + 55, 33 + 34 + 56, 33 + 34 + 58, 33 + 34 + 60, 33 + 34 + 98,
33 + 34 + 100, 33 + 34 + 102, 33 + 34 + 106, 33 + 34 + 108, 33 + 34 + 110, 33 + 35 + 36, 33 +
35 + 37, 33 + 35 + 54, 33 + 35 + 55, 33 + 35 + 56, 33 + 35 + 58, 33 + 35 + 60, 33 + 35 + 98,
33 + 35 + 100, 33 + 35 + 102, 33 + 35 + 106, 33 + 35 + 108, 33 + 35 + 110, 33 + 36 + 37, 33 +
36 + 54, 33 + 36 + 55, 33 + 36 + 56, 33 + 36 + 58, 33 + 36 + 60, 33 + 36 + 98, 33 + 36 +
100, 33 + 36 + 102, 33 + 36 + 106, 33 + 36 + 108, 33 + 36 + 110, 33 + 37 + 54, 33 + 37 + 55,
33 + 37 + 56, 33 + 37 + 58, 33 + 37 + 60, 33 + 37 + 98, 33 + 37 + 100, 33 + 37 + 102, 33 + 37 +
106, 33 + 37 + 108, 33 + 37 + 110, 33 + 54 + 55, 33 + 54 + 56, 33 + 54 + 58, 33 + 54 + 60,
33 + 54 + 98, 33 + 54 + 100, 33 + 54 + 102, 33 + 54 + 106, 33 + 54 + 108, 33 + 54 + 110, 33 +
55 + 56, 33 + 55 + 58, 33 + 55 + 60, 33 + 55 + 98, 33 + 55 + 100, 33 + 55 + 102, 33 + 55 +
106, 33 + 55 + 108, 33 + 55 + 110, 33 + 56 + 58, 33 + 56 + 60, 33 + 56 + 98, 33 + 56 + 100,
33 + 56 + 102, 33 + 56 + 106, 33 + 56 + 108, 33 + 56 + 110, 33 + 58 + 60, 33 + 58 + 98, 33 +
58 + 100, 33 + 58 + 102, 33 + 58 + 106, 33 + 58 + 108, 33 + 58 + 110, 33 + 60 + 98, 33 + 60 +
100, 33 + 60 + 102, 33 + 60 + 106, 33 + 60 + 108, 33 + 60 + 110, 33 + 98 + 100, 33 + 98 +
102, 33 + 98 + 106, 33 + 98 + 108, 33 + 98 + 110, 33 + 100 + 102, 33 + 100 + 106, 33 + 100 +
108, 33 + 100 + 110, 33 + 102 + 106, 33 + 102 + 108, 33 + 102 + 110, 33 + 106 + 108, 33 +
106 + 110, 33 + 108 + 110, 34 + 35 + 36, 34 + 35 + 37, 34 + 35 + 54, 34 + 35 + 55, 34 + 35 +
56, 34 + 35 + 58, 34 + 35 + 60, 34 + 35 + 98, 34 + 35 + 100, 34 + 35 + 102, 34 + 35 + 106, 34 +
35 + 108, 34 + 35 + 110, 34 + 36 + 37, 34 + 36 + 54, 34 + 36 + 55, 34 + 36 + 56, 34 + 36 +
58, 34 + 36 + 60, 34 + 36 + 98, 34 + 36 + 100, 34 + 36 + 102, 34 + 36 + 106, 34 + 36 + 108,
34 + 36 + 110, 34 + 37 + 54, 34 + 37 + 55, 34 + 37 + 56, 34 + 37 + 58, 34 + 37 + 60, 34 + 37 +
98, 34 + 37 + 100, 34 + 37 + 102, 34 + 37 + 106, 34 + 37 + 108, 34 + 37 + 110, 34 + 54 +
55, 34 + 54 + 56, 34 + 54 + 58, 34 + 54 + 60, 34 + 54 + 98, 34 + 54 + 100, 34 + 54 + 102, 34 +
54 + 106, 34 + 54 + 108, 34 + 54 + 110, 34 + 55 + 56, 34 + 55 + 58, 34 + 55 + 60, 34 + 55 +
98, 34 + 55 + 100, 34 + 55 + 102, 34 + 55 + 106, 34 + 55 + 108, 34 + 55 + 110, 34 + 56 + 58,
34 + 56 + 60, 34 + 56 + 98, 34 + 56 + 100, 34 + 56 + 102, 34 + 56 + 106, 34 + 56 + 108, 34 +
56 + 110, 34 + 58 + 60, 34 + 58 + 98, 34 + 58 + 100, 34 + 58 + 102, 34 + 58 + 106, 34 + 58 +
108, 34 + 58 + 110, 34 + 60 + 98, 34 + 60 + 100, 34 + 60 + 102, 34 + 60 + 106, 34 + 60 + 108,
34 + 60 + 110, 34 + 98 + 100, 34 + 98 + 102, 34 + 98 + 106, 34 + 98 + 108, 34 + 98 + 110, 34 +
100 + 102, 34 + 100 + 106, 34 + 100 + 108, 34 + 100 + 110, 34 + 102 + 106, 34 + 102 +
108, 34 + 102 + 110, 34 + 106 + 108, 34 + 106 + 110, 34 + 108 + 110, 35 + 36 + 37, 35 + 36 +
54, 35 + 36 + 55, 35 + 36 + 56, 35 + 36 + 58, 35 + 36 + 60, 35 + 36 + 98, 35 + 36 + 100, 35 +
36 + 102, 35 + 36 + 106, 35 + 36 + 108, 35 + 36 + 110, 35 + 37 + 54, 35 + 37 + 55, 35 + 37 +
56, 35 + 37 + 58, 35 + 37 + 60, 35 + 37 + 98, 35 + 37 + 100, 35 + 37 + 102, 35 + 37 + 106, 35 +
37 + 108, 35 + 37 + 110, 35 + 54 + 55, 35 + 54 + 56, 35 + 54 + 58, 35 + 54 + 60, 35 + 54 +
98, 35 + 54 + 100, 35 + 54 + 102, 35 + 54 + 106, 35 + 54 + 108, 35 + 54 + 110, 35 + 55 + 56,
35 + 55 + 58, 35 + 55 + 60, 35 + 55 + 98, 35 + 55 + 100, 35 + 55 + 102, 35 + 55 + 106, 35 +
55 + 108, 35 + 55 + 110, 35 + 56 + 58, 35 + 56 + 60, 35 + 56 + 98, 35 + 56 + 100, 35 + 56 +
102, 35 + 56 + 106, 35 + 56 + 108, 35 + 56 + 110, 35 + 58 + 60, 35 + 58 + 98, 35 + 58 + 100,
35 + 58 + 102, 35 + 58 + 106, 35 + 58 + 108, 35 + 58 + 110, 35 + 60 + 98, 35 + 60 + 100, 35 +
60 + 102, 35 + 60 + 106, 35 + 60 + 108, 35 + 60 + 110, 35 + 98 + 100, 35 + 98 + 102, 35 +
98 + 106, 35 + 98 + 108, 35 + 98 + 110, 35 + 100 + 102, 35 + 100 + 106, 35 + 100 + 108, 35 +
100 + 110, 35 + 102 + 106, 35 + 102 + 108, 35 + 102 + 110, 35 + 106 + 108, 35 + 106 + 110,
35 + 108 + 110, 36 + 37 + 54, 36 + 37 + 55, 36 + 37 + 56, 36 + 37 + 58, 36 + 37 + 60, 36 + 37 +
98, 36 + 37 + 100, 36 + 37 + 102, 36 + 37 + 106, 36 + 37 + 108, 36 + 37 + 110, 36 + 54 +
55, 36 + 54 + 56, 36 + 54 + 58, 36 + 54 + 60, 36 + 54 + 98, 36 + 54 + 100, 36 + 54 + 102, 36 +
54 + 106, 36 + 54 + 108, 36 + 54 + 110, 36 + 55 + 56, 36 + 55 + 58, 36 + 55 + 60, 36 + 55 +
98, 36 + 55 + 100, 36 + 55 + 102, 36 + 55 + 106, 36 + 55 + 108, 36 + 55 + 110, 36 + 56 + 58,
36 + 56 + 60, 36 + 56 + 98, 36 + 56 + 100, 36 + 56 + 102, 36 + 56 + 106, 36 + 56 + 108, 36 +
56 + 110, 36 + 58 + 60, 36 + 58 + 98, 36 + 58 + 100, 36 + 58 + 102, 36 + 58 + 106, 36 + 58 +
108, 36 + 58 + 110, 36 + 60 + 98, 36 + 60 + 100, 36 + 60 + 102, 36 + 60 + 106, 36 + 60 + 108,
36 + 60 + 110, 36 + 98 + 100, 36 + 98 + 102, 36 + 98 + 106, 36 + 98 + 108, 36 + 98 + 110, 36 +
100 + 102, 36 + 100 + 106, 36 + 100 + 108, 36 + 100 + 110, 36 + 102 + 106, 36 + 102 +
108, 36 + 102 + 110, 36 + 106 + 108, 36 + 106 + 110, 36 + 108 + 110, 37 + 54 + 55, 37 + 54 +
56, 37 + 54 + 58, 37 + 54 + 60, 37 + 54 + 98, 37 + 54 + 100, 37 + 54 + 102, 37 + 54 + 106, 37 +
54 + 108, 37 + 54 + 110, 37 + 55 + 56, 37 + 55 + 58, 37 + 55 + 60, 37 + 55 + 98, 37 + 55 +
100, 37 + 55 + 102, 37 + 55 + 106, 37 + 55 + 108, 37 + 55 + 110, 37 + 56 + 58, 37 + 56 + 60,
37 + 56 + 98, 37 + 56 + 100, 37 + 56 + 102, 37 + 56 + 106, 37 + 56 + 108, 37 + 56 + 110, 37 +
58 + 60, 37 + 58 + 98, 37 + 58 + 100, 37 + 58 + 102, 37 + 58 + 106, 37 + 58 + 108, 37 + 58 +
110, 37 + 60 + 98, 37 + 60 + 100, 37 + 60 + 102, 37 + 60 + 106, 37 + 60 + 108, 37 + 60 +
110, 37 + 98 + 100, 37 + 98 + 102, 37 + 98 + 106, 37 + 98 + 108, 37 + 98 + 110, 37 + 100 +
102, 37 + 100 + 106, 37 + 100 + 108, 37 + 100 + 110, 37 + 102 + 106, 37 + 102 + 108, 37 +
102 + 110, 37 + 106 + 108, 37 + 106 + 110, 37 + 108 + 110, 54 + 55 + 56, 54 + 55 + 58, 54 +
55 + 60, 54 + 55 + 98, 54 + 55 + 100, 54 + 55 + 102, 54 + 55 + 106, 54 + 55 + 108, 54 + 55 +
110, 54 + 56 + 58, 54 + 56 + 60, 54 + 56 + 98, 54 + 56 + 100, 54 + 56 + 102, 54 + 56 + 106,
54 + 56 + 108, 54 + 56 + 110, 54 + 58 + 60, 54 + 58 + 98, 54 + 58 + 100, 54 + 58 + 102, 54 +
58 + 106, 54 + 58 + 108, 54 + 58 + 110, 54 + 60 + 98, 54 + 60 + 100, 54 + 60 + 102, 54 + 60 +
106, 54 + 60 + 108, 54 + 60 + 110, 54 + 98 + 100, 54 + 98 + 102, 54 + 98 + 106, 54 + 98 +
108, 54 + 98 + 110, 54 + 100 + 102, 54 + 100 + 106, 54 + 100 + 108, 54 + 100 + 110, 54 +
102 + 106, 54 + 102 + 108, 54 + 102 + 110, 54 + 106 + 108, 54 + 106 + 110, 54 + 108 + 110,
55 + 56 + 58, 55 + 56 + 60, 55 + 56 + 98, 55 + 56 + 100, 55 + 56 + 102, 55 + 56 + 106, 55 +
56 + 108, 55 + 56 + 110, 55 + 58 + 60, 55 + 58 + 98, 55 + 58 + 100, 55 + 58 + 102, 55 + 58 +
106, 55 + 58 + 108, 55 + 58 + 110, 55 + 60 + 98, 55 + 60 + 100, 55 + 60 + 102, 55 + 60 + 106,
55 + 60 + 108, 55 + 60 + 110, 55 + 98 + 100, 55 + 98 + 102, 55 + 98 + 106, 55 + 98 + 108, 55 +
98 + 110, 55 + 100 + 102, 55 + 100 + 106, 55 + 100 + 108, 55 + 100 + 110, 55 + 102 + 106,
55 + 102 + 108, 55 + 102 + 110, 55 + 106 + 108, 55 + 106 + 110, 55 + 108 + 110, 56 + 58 +
60, 56 + 58 + 98, 56 + 58 + 100, 56 + 58 + 102, 56 + 58 + 106, 56 + 58 + 108, 56 + 58 + 110,
56 + 60 + 98, 56 + 60 + 100, 56 + 60 + 102, 56 + 60 + 106, 56 + 60 + 108, 56 + 60 + 110, 56 +
98 + 100, 56 + 98 + 102, 56 + 98 + 106, 56 + 98 + 108, 56 + 98 + 110, 56 + 100 + 102, 56 +
100 + 106, 56 + 100 + 108, 56 + 100 + 110, 56 + 102 + 106, 56 + 102 + 108, 56 + 102 + 110,
56 + 106 + 108, 56 + 106 + 110, 56 + 108 + 110, 58 + 60 + 98, 58 + 60 + 100, 58 + 60 + 102,
58 + 60 + 106, 58 + 60 + 108, 58 + 60 + 110, 58 + 98 + 100, 58 + 98 + 102, 58 + 98 + 106, 58 +
98 + 108, 58 + 98 + 110, 58 + 100 + 102, 58 + 100 + 106, 58 + 100 + 108, 58 + 100 + 110,
58 + 102 + 106, 58 + 102 + 108, 58 + 102 + 110, 58 + 106 + 108, 58 + 106 + 110, 58 + 108 +
110, 60 + 98 + 100, 60 + 98 + 102, 60 + 98 + 106, 60 + 98 + 108, 60 + 98 + 110, 60 + 100 +
102, 60 + 100 + 106, 60 + 100 + 108, 60 + 100 + 110, 60 + 102 + 106, 60 + 102 + 108, 60 +
102 + 110, 60 + 106 + 108, 60 + 106 + 110, 60 + 108 + 110, 98 + 100 + 102, 98 + 100 + 106,
98 + 100 + 108, 98 + 100 + 110, 98 + 102 + 106, 98 + 102 + 108, 98 + 102 + 110, 98 + 106 +
108, 98 + 106 + 110, 98 + 108 + 110, 100 + 102 + 106, 100 + 102 + 108, 100 + 102 + 110,
100 + 106 + 108, 100 + 106 + 110, 100 + 108 + 110, 102 + 106 + 108, 102 + 106 + 110, 102 +
108 + 110, 106 + 108 + 110,

[0371] In some examples of any of the ABPCs described herein, a light chain variable domain includes a light chain variable domain that is at least 90% (e.g., at least 92%, at least 94%, at least 96%, at least 98%, at least 99%, or 100%) identical to SEQ ID NO: 237, where the light chain variable domain includes a histidine at any of the specific combinations of one or more amino acid positions in SEQ ID NO: 237 listed in Table 6.

TABLE 6
Exemplary Combinations of Amino Acid Positions in SEQ
ID NO: 237 that can be substituted with histidine

25 + 29, 25 + 32, 25 + 33, 25 + 49, 25 + 50, 25 + 90, 25 + 91, 25 + 93, 25 + 95, 29 + 32,
29 + 33, 29 + 49, 29 + 50, 29 + 90, 29 + 91, 29 + 93, 29 + 95, 32 + 33, 32 + 49, 32 + 50,
32 + 90, 32 + 91, 32 + 93, 32 + 95, 33 + 49, 33 + 50, 33 + 90, 33 + 91, 33 + 93, 33 + 95,
49 + 50, 49 + 90, 49 + 91, 49 + 93, 49 + 95, 50 + 90, 50 + 91, 50 + 93, 50 + 95, 90 + 91,
90 + 93, 90 + 95, 91 + 93, 91 + 95, 93 + 95, 25 + 29 + 32, 25 + 29 + 33, 25 + 29 + 49, 25 +
29 + 50, 25 + 29 + 90, 25 + 29 + 91, 25 + 29 + 93, 25 + 29 + 95, 25 + 32 + 33, 25 + 32 +
49, 25 + 32 + 50, 25 + 32 + 90, 25 + 32 + 91, 25 + 32 + 93, 25 + 32 + 95, 25 + 33 + 49, 25 +
33 + 50, 25 + 33 + 90, 25 + 33 + 91, 25 + 33 + 93, 25 + 33 + 95, 25 + 49 + 50, 25 + 49 +
90, 25 + 49 + 91, 25 + 49 + 93, 25 + 49 + 95, 25 + 50 + 90, 25 + 50 + 91, 25 + 50 + 93, 25 +
50 + 95, 25 + 90 + 91, 25 + 90 + 93, 25 + 90 + 95, 25 + 91 + 93, 25 + 91 + 95, 25 + 93 +
95, 29 + 32 + 33, 29 + 32 + 49, 29 + 32 + 50, 29 + 32 + 90, 29 + 32 + 91, 29 + 32 + 93, 29 +
32 + 95, 29 + 33 + 49, 29 + 33 + 50, 29 + 33 + 90, 29 + 33 + 91, 29 + 33 + 93, 29 + 33 +
95, 29 + 49 + 50, 29 + 49 + 90, 29 + 49 + 91, 29 + 49 + 93, 29 + 49 + 95, 29 + 50 + 90, 29 +
50 + 91, 29 + 50 + 93, 29 + 50 + 95, 29 + 90 + 91, 29 + 90 + 93, 29 + 90 + 95, 29 + 91 +
93, 29 + 91 + 95, 29 + 93 + 95, 32 + 33 + 49, 32 + 33 + 50, 32 + 33 + 90, 32 + 33 + 91, 32 +
33 + 93, 32 + 33 + 95, 32 + 49 + 50, 32 + 49 + 90, 32 + 49 + 91, 32 + 49 + 93, 32 + 49 +
95, 32 + 50 + 90, 32 + 50 + 91, 32 + 50 + 93, 32 + 50 + 95, 32 + 90 + 91, 32 + 90 + 93, 32 +
90 + 95, 32 + 91 + 93, 32 + 91 + 95, 32 + 93 + 95, 33 + 49 + 50, 33 + 49 + 90, 33 + 49 +
91, 33 + 49 + 93, 33 + 49 + 95, 33 + 50 + 90, 33 + 50 + 91, 33 + 50 + 93, 33 + 50 + 95, 33 +
90 + 91, 33 + 90 + 93, 33 + 90 + 95, 33 + 91 + 93, 33 + 91 + 95, 33 + 93 + 95, 49 + 50 +
90, 49 + 50 + 91, 49 + 50 + 93, 49 + 50 + 95, 49 + 90 + 91, 49 + 90 + 93, 49 + 90 + 95, 49 +
91 + 93, 49 + 91 + 95, 49 + 93 + 95, 50 + 90 + 91, 50 + 90 + 93, 50 + 90 + 95, 50 + 91 +
93, 50 + 91 + 95, 50 + 93 + 95, 90 + 91 + 93, 90 + 91 + 95, 90 + 93 + 95, 91 + 93 + 95

[0372] In some examples of any of the ABPCs described herein, the first antigen-binding domain includes a heavy chain variable domain that is at least 90% (e.g., at least 92%, at least 94%, at least 96%, at least 98%, at least 99%, or 100%) identical to SEQ ID NO: 236, where the heavy chain variable domain includes a histidine at any of the specific combinations of one or more amino acid positions in SEQ ID NO: 236 listed in Table 5; and a light chain variable domain that that is at least 90% (e.g., at least 92%, at least 94%, at least 96%, at least 98%, at least 99%, or 100%) identical to SEQ ID NO: 237, where the light chain variable domain includes a histidine at any of the specific combinations of one or more amino acid positions in SEQ ID NO: 237 listed in Table 6.

[0373] In some examples of any of the ABPCs described herein, the first antigen-binding domain includes a heavy chain variable domain that is at least 90% (e.g., at least 92%, at least 94%, at least 96%, at least 98%, at least 99%, or 100%) identical to SEQ ID NO: 236, where the heavy chain variable domain includes a histidine at any of the specific combinations of one or more amino acid positions in SEQ ID NO: 236 listed in Table 5, and where the heavy chain variable domain includes an alanine at position 52 in SEQ ID NO: 236; and a light chain variable domain that that is at least 90% (e.g., at least 92%, at least 94%, at least 96%, at least 98%, at least 99%, or 100%) identical to SEQ ID NO: 237, where the light chain variable domain includes a histidine at any of the specific combinations of one or more amino acid positions in SEQ ID NO: 237 listed in Table 6.

[0374] In some examples of any of the ABPCs described herein, the first antigen-binding domain comprises a light chain variable domain that is at least 90% identical to SEQ ID NO: 237, wherein the light chain variable domain includes a histidine at position 25 in SEQ ID NO: 237; and a heavy chain variable domain that is at least 90% (e.g., at least 92%, at least 94%, at least 96%, at least 98%, at least 99%, or 100%) identical to SEQ ID NO: 236, where the heavy chain variable domain includes a histidine at any of the specific combinations of one or more amino acid positions in SEQ ID NO: 236 listed in Table 5.

[0375] In some examples of any of the ABPCs described herein, the first antigen-binding domain comprises a light chain variable domain comprising SEQ ID NO: 237, and a heavy chain variable domain that is at least 90% identical (e.g., at least 92%, at least 94%, at least 96%, at least 98%, at least 99%, or 100%) identical to SEQ ID NO: 236, where the heavy chain variable domain includes a histidine at any of the specific combinations of one or more (e.g., two, three, four, five, six, seven, eight, nine, or ten) amino acid positions in SEQ ID NO: 236 listed in Table 5.

[0376] In some examples of any of the ABPCs described herein, the first antigen-binding domain comprises a light chain variable domain that is at least 90% identical to SEQ ID NO: 237, wherein the light chain variable domain includes a histidine at position 29 in SEQ ID NO: 237; and a heavy chain variable domain that is at least 90% (e.g., at least 92%, at least 94%, at least 96%, at least 98%, at least 99%, or 100%) identical to SEQ ID NO: 236, where the heavy chain variable domain includes a histidine at any of the specific combinations of one or more amino acid positions in SEQ ID NO: 236 listed in Table 5.

[0377] In some examples of any of the ABPCs described herein, the first antigen-binding domain comprises a light chain variable domain that is at least 90% identical to SEQ ID NO: 237, wherein the light chain variable domain includes a histidine at position 32 in SEQ ID NO: 237; and a heavy chain variable domain that is at least 90% (e.g., at least 92%, at least 94%, at least 96%, at least 98%, at least 99%, or 100%) identical to SEQ ID NO: 236, where the heavy chain variable domain includes a histidine at any of the specific combinations of one or more amino acid positions in SEQ ID NO: 236 listed in Table 5.

[0378] In some examples of any of the ABPCs described herein, the first antigen-binding domain comprises a light chain variable domain that is at least 90% identical to SEQ ID NO: 237, wherein the light chain variable domain includes a histidine at position 33 in SEQ ID NO: 237; and a heavy chain variable domain that is at least 90% (e.g., at least 92%, at least 94%, at least 96%, at least 98%, at least 99%, or 100%) identical to SEQ ID NO: 236, where the heavy chain variable domain includes a histidine at any of the specific combinations of one or more amino acid positions in SEQ ID NO: 236 listed in Table 5.

[0379] In some examples of any of the ABPCs described herein, the first antigen-binding domain comprises a light chain variable domain that is at least 90% identical to SEQ ID NO: 237, wherein the light chain variable domain includes a histidine at position 49 in SEQ ID NO: 237; and a heavy chain variable domain that is at least 90% (e.g., at least 92%, at least 94%, at least 96%, at least 98%, at least 99%, or 100%) identical to SEQ ID NO: 236, where the heavy chain variable domain includes a histidine at any of the specific combinations of one or more amino acid positions in SEQ ID NO: 236 listed in Table 5.

[0380] In some examples of any of the ABPCs described herein, the first antigen-binding domain comprises a light chain variable domain that is at least 90% identical to SEQ ID NO: 237, wherein the light chain variable domain includes a histidine at position 50 in SEQ ID NO: 237; and a heavy chain variable domain that is at least 90% (e.g., at least 92%, at least 94%, at least 96%, at least 98%, at least 99%, or 100%) identical to SEQ ID NO: 236, where the heavy chain variable domain includes a histidine at any of the specific combinations of one or more amino acid positions in SEQ ID NO: 236 listed in Table 5.

[0381] In some examples of any of the ABPCs described herein, the first antigen-binding domain comprises a light chain variable domain that is at least 90% identical to SEQ ID NO: 237, wherein the light chain variable domain includes a histidine at position 90 in SEQ ID NO: 237; and a heavy chain variable domain that is at least 90% (e.g., at least 92%, at least 94%, at least 96%, at least 98%, at least 99%, or 100%) identical to SEQ ID NO: 236, where the heavy chain variable domain includes a histidine at any of the specific combinations of one or more amino acid positions in SEQ ID NO: 236 listed in Table 5.

[0382] In some examples of any of the ABPCs described herein, the first antigen-binding domain comprises a light chain variable domain that is at least 90% identical to SEQ ID NO: 237, wherein the light chain variable domain includes a histidine at position 91 in SEQ ID NO: 237; and a heavy chain variable domain that is at least 90% (e.g., at least 92%, at least 94%, at least 96%, at least 98%, at least 99%, or 100%) identical to SEQ ID NO: 236, where the heavy chain variable domain includes a histidine at any of the specific combinations of one or more amino acid positions in SEQ ID NO: 236 listed in Table 5.

[0383] In some examples of any of the ABPCs described herein, the first antigen-binding domain comprises a light chain variable domain that is at least 90% identical to SEQ ID NO: 237, wherein the light chain variable domain includes a histidine at position 93 in SEQ ID NO: 237; and a heavy chain variable domain that is at least 90% (e.g., at least 92%, at least 94%, at least 96%, at least 98%, at least 99%, or 100%) identical to SEQ ID NO: 236, where the heavy chain variable domain includes a histidine at any of the specific combinations of one or more amino acid positions in SEQ ID NO: 236 listed in Table 5.

[0384] In some examples of any of the ABPCs described herein, the first antigen-binding domain comprises a light chain variable domain that is at least 90% identical to SEQ ID NO: 237, wherein the light chain variable domain includes a histidine at position 95 in SEQ ID NO: 237; and a heavy chain variable domain that is at least 90% (e.g., at least 92%, at least 94%, at least 96%, at least 98%, at least 99%, or 100%) identical to SEQ ID NO: 236, where the heavy chain variable domain includes a histidine at any of the specific combinations of one or more amino acid positions in SEQ ID NO: 236 listed in Table 5.

[0385] In some examples of any of the ABPCs described herein, the first antigen-binding domain includes a heavy chain variable domain of SC16.13 with one or more (e.g., one, two, three, four, five, six, seven, eight, nine, ten, eleven, twelve, thirteen, fourteen, fifteen, sixteen, seventeen, eighteen, nineteen, or twenty) histidine(s) substituted with an alanine. In some examples of any of the ABPCs described herein, the first antigen-binding domain includes a light chain variable domain of SC16.13 with one or more (e.g., one, two, three, four, five, six, seven, eight, nine, ten, eleven, twelve, thirteen, fourteen, fifteen, sixteen, seventeen, eighteen, nineteen, or twenty) histidine(s) substituted with an alanine. In some examples of any of the ABPCs described herein, the first antigen-binding domain includes a heavy chain variable domain of SC16.13 with one or more (e.g., one, two, three, four, five, six, seven, eight, nine, ten, eleven, twelve, thirteen, fourteen, fifteen, sixteen, seventeen, eighteen, nineteen, or twenty) histidines substituted with an alanine; and a light chain variable domain of SC16.13 with one or more (e.g., one, two, three, four, five, six, seven, eight, nine, ten, eleven, twelve, thirteen, fourteen, fifteen, sixteen, seventeen, eighteen, nineteen, or twenty) histidine(s) substituted with an alanine. In some examples of any of the ABPCs described herein, the heavy chain variable domain of SC16.13 comprises SEQ ID NO: 236. In some examples of any of the ABPCs described herein, the light chain variable domain of SC16.13 comprises SEQ ID NO: 237.

[0386] In some examples of any of the ABPCs described herein, the first antigen-binding domain comprises a heavy chain variable domain comprising a CDR1, a CDR2, and a CDR3 of SEQ ID NO: 628, SEQ ID NO: 629, and SEQ ID NO: 630, respectively, with collectively a total of one or more (e.g., one, two, three, four, five, six, seven, eight, nine, or ten) histidine(s) in SEQ ID NOs: 628-630 substituted with an alanine. In some examples of any of the ABPCs described herein, the first antigen-binding domain comprises a light chain variable domain comprising a CDR1, a CDR2, and a CDR3 of SEQ ID NO: 631, SEQ ID NO: 632, and SEQ ID NO: 633, respectively, with collectively a total of one or more (e.g., one, two, three, four, five, six, seven, eight, nine, or ten) histidine(s) in SEQ ID NOs: 631-633 substituted with an alanine. In some examples of any of the ABPCs described herein, the first antigen-binding domain includes: a heavy chain variable domain comprising a CDR1, a CDR2, and a CDR3 of SEQ ID NO: 628, SEQ ID NO: 629, and SEQ ID NO: 630, respectively, with collectively a total of one or more (e.g., one, two, three, four, five, six, seven, eight, nine, or ten) histidine(s) in SEQ ID NOs: 628-630 substituted with an alanine; and a light chain variable domain comprising a CDR1, a CDR2, and a CDR3 of SEQ ID NO: 631, SEQ ID NO: 632, and SEQ ID NO: 633, respectively, with collectively a total of one or more (e.g., one, two, three, four, five, six, seven, eight, nine, or ten) histidine(s) in SEQ ID NOs: 631-633 substituted with an alanine.

[0387] In some examples of any of the ABPCs described herein, the first antigen-binding domain comprises a heavy chain variable domain of SEQ ID NO: 236, SEQ ID NO: 238, SEQ ID NO: 239, SEQ ID NO: 240, SEQ ID NO: 241, SEQ ID NO: 242, SEQ ID NO: 243, SEQ ID NO: 244, SEQ ID NO: 245, SEQ ID NO: 246, SEQ ID NO: 247, SEQ ID NO: 248, SEQ ID NO: 249, SEQ ID NO: 250, SEQ ID NO: 251, SEQ ID NO: 252, SEQ ID NO: 253, SEQ ID NO: 254, SEQ ID NO: 255, SEQ ID NO: 256, SEQ ID NO: 257, SEQ ID NO: 258, SEQ ID NO: 259, SEQ ID NO: 260, SEQ ID NO: 261, SEQ ID NO: 262, SEQ ID NO: 263, SEQ ID NO: 264, SEQ ID NO: 265, SEQ ID NO: 266, SEQ ID NO: 267, SEQ ID NO: 268, SEQ ID NO: 269, SEQ ID NO: 270, SEQ ID NO: 271, SEQ ID NO: 272, SEQ ID NO: 273, SEQ ID NO: 274, SEQ ID NO: 275, SEQ ID NO: 276, SEQ ID NO: 277, SEQ ID NO: 278, SEQ ID NO: 279, SEQ ID NO: 280, or SEQ ID NO: 281.

[0388] In some examples of any of the ABPCs described herein, the first antigen-binding domain includes a light chain variable domain of SEQ ID NO: 237, SEQ ID NO: 282, SEQ ID NO: 283, SEQ ID NO: 284, SEQ ID NO: 285, SEQ ID NO: 286, SEQ ID NO: 287, SEQ ID NO: 288, SEQ ID NO: 289, SEQ ID NO: 290, SEQ ID NO: 291, SEQ ID NO: 292, SEQ ID NO: 293, SEQ ID NO: 294, SEQ ID NO: 295, SEQ ID NO: 296, SEQ ID NO: 297, SEQ ID NO: 298, SEQ ID NO: 299, SEQ ID NO: 300, SEQ ID NO: 301, SEQ ID NO: 302, SEQ ID NO: 303, SEQ ID NO: 304, SEQ ID NO: 305, SEQ ID NO: 306, or SEQ ID NO: 307.

[0389] In some examples of any of the ABPCs described herein, the first antigen-binding domain includes a light chain variable domain comprising SEQ ID NO: 237, and a heavy chain variable domain comprising SEQ ID NO: 236, SEQ ID NO: 238, SEQ ID NO: 239, SEQ ID NO: 240, SEQ ID NO: 241, SEQ ID NO: 242, SEQ ID NO: 243, SEQ ID NO: 244, SEQ ID NO: 245, SEQ ID NO: 246, SEQ ID NO: 247, SEQ ID NO: 248, SEQ ID NO: 249, SEQ ID NO: 250, SEQ ID NO: 251, SEQ ID NO: 252, SEQ ID NO: 253, SEQ ID NO: 254, SEQ ID NO: 255, SEQ ID NO: 256, SEQ ID NO: 257, SEQ ID NO: 258, SEQ ID NO: 259, SEQ ID NO: 260, SEQ ID NO: 261, SEQ ID NO: 262, SEQ ID NO: 263, SEQ ID NO: 264, SEQ ID NO: 265, SEQ ID NO: 266, SEQ ID NO: 267, SEQ ID NO: 268, SEQ ID NO: 269, SEQ ID NO: 270, SEQ ID NO: 271, SEQ ID NO: 272, SEQ ID NO: 273, SEQ ID NO: 274, SEQ ID NO: 275, SEQ ID NO: 276, SEQ ID NO: 277, SEQ ID NO: 278, SEQ ID NO: 279, SEQ ID NO: 280, or SEQ ID NO: 281.

[0390] In some examples of any of the ABPCs described herein, the first antigen-binding domain includes a light chain variable domain comprising SEQ ID NO: 282, and a heavy chain variable domain comprising SEQ ID NO: 236, SEQ ID NO: 238, SEQ ID NO: 239, SEQ ID NO: 240, SEQ ID NO: 241, SEQ ID NO: 242, SEQ ID NO: 243, SEQ ID NO: 244, SEQ ID NO: 245, SEQ ID NO: 246, SEQ ID NO: 247, SEQ ID NO: 248, SEQ ID NO: 249, SEQ ID NO: 250, SEQ ID NO: 251, SEQ ID NO: 252, SEQ ID NO: 253, SEQ ID NO: 254, SEQ ID NO: 255, SEQ ID NO: 256, SEQ ID NO: 257, SEQ ID NO: 258, SEQ ID NO: 259, SEQ ID NO: 260, SEQ ID NO: 261, SEQ ID NO: 262, SEQ ID NO: 263, SEQ ID NO: 264, SEQ ID NO: 265, SEQ ID NO: 266, SEQ ID NO: 267, SEQ ID NO: 268, SEQ ID NO: 269, SEQ ID NO: 270, SEQ ID NO: 271, SEQ ID NO: 272, SEQ ID NO: 273, SEQ ID NO: 274, SEQ ID NO: 275, SEQ ID NO: 276, SEQ ID NO: 277, SEQ ID NO: 278, SEQ ID NO: 279, SEQ ID NO: 280, or SEQ ID NO: 281.

[0391] In some examples of any of the ABPCs described herein, the first antigen-binding domain includes a light chain variable domain comprising SEQ ID NO: 283, and a heavy chain variable domain comprising SEQ ID NO: 236, SEQ ID NO: 238, SEQ ID NO: 239, SEQ ID NO: 240, SEQ ID NO: 241, SEQ ID NO: 242, SEQ ID NO: 243, SEQ ID NO: 244, SEQ ID NO: 245, SEQ ID NO: 246, SEQ ID NO: 247, SEQ ID NO: 248, SEQ ID NO: 249, SEQ ID NO: 250, SEQ ID NO: 251, SEQ ID NO: 252, SEQ ID NO: 253, SEQ ID NO: 254, SEQ ID NO: 255, SEQ ID NO: 256, SEQ ID NO: 257, SEQ ID NO: 258, SEQ ID NO: 259, SEQ ID NO: 260, SEQ ID NO: 261, SEQ ID NO: 262, SEQ ID NO: 263, SEQ ID NO: 264, SEQ ID NO: 265, SEQ ID NO: 266, SEQ ID NO: 267, SEQ ID NO: 268, SEQ ID NO: 269, SEQ ID NO: 270, SEQ ID NO: 271, SEQ ID NO: 272, SEQ ID NO: 273, SEQ ID NO: 274, SEQ ID NO: 275, SEQ ID NO: 276, SEQ ID NO: 277, SEQ ID NO: 278, SEQ ID NO: 279, SEQ ID NO: 280, or SEQ ID NO: 281.

[0392] In some examples of any of the ABPCs described herein, the first antigen-binding domain includes a light chain variable domain comprising SEQ ID NO: 284, and a heavy chain variable domain comprising SEQ ID NO: 236, SEQ ID NO: 238, SEQ ID NO: 239, SEQ ID NO: 240, SEQ ID NO: 241, SEQ ID NO: 242, SEQ ID NO: 243, SEQ ID NO: 244, SEQ ID NO: 245, SEQ ID NO: 246, SEQ ID NO: 247, SEQ ID NO: 248, SEQ ID NO: 249, SEQ ID NO: 250, SEQ ID NO: 251, SEQ ID NO: 252, SEQ ID NO: 253, SEQ ID NO: 254, SEQ ID NO: 255, SEQ ID NO: 256, SEQ ID NO: 257, SEQ ID NO: 258, SEQ ID NO: 259, SEQ ID NO: 260, SEQ ID NO: 261, SEQ ID NO: 262, SEQ ID NO: 263, SEQ ID NO: 264, SEQ ID NO: 265, SEQ ID NO: 266, SEQ ID NO: 267, SEQ ID NO: 268, SEQ ID NO: 269, SEQ ID NO: 270, SEQ ID NO: 271, SEQ ID NO: 272, SEQ ID NO: 273, SEQ ID NO: 274, SEQ ID NO: 275, SEQ ID NO: 276, SEQ ID NO: 277, SEQ ID NO: 278, SEQ ID NO: 279, SEQ ID NO: 280, or SEQ ID NO: 281.

[0393] In some examples of any of the ABPCs described herein, the first antigen-binding domain includes a light chain variable domain comprising SEQ ID NO: 285, and a heavy chain variable domain comprising SEQ ID NO: 236, SEQ ID NO: 238, SEQ ID NO: 239, SEQ ID NO: 240, SEQ ID NO: 241, SEQ ID NO: 242, SEQ ID NO: 243, SEQ ID NO: 244, SEQ ID NO: 245, SEQ ID NO: 246, SEQ ID NO: 247, SEQ ID NO: 248, SEQ ID NO: 249, SEQ ID NO: 250, SEQ ID NO: 251, SEQ ID NO: 252, SEQ ID NO: 253, SEQ ID NO: 254, SEQ ID NO: 255, SEQ ID NO: 256, SEQ ID NO: 257, SEQ ID NO: 258, SEQ ID NO: 259, SEQ ID NO: 260, SEQ ID NO: 261, SEQ ID NO: 262, SEQ ID NO: 263, SEQ ID NO: 264, SEQ ID NO: 265, SEQ ID NO: 266, SEQ ID NO: 267, SEQ ID NO: 268, SEQ ID NO: 269, SEQ ID NO: 270, SEQ ID NO: 271, SEQ ID NO: 272, SEQ ID NO: 273, SEQ ID NO: 274, SEQ ID NO: 275, SEQ ID NO: 276, SEQ ID NO: 277, SEQ ID NO: 278, SEQ ID NO: 279, SEQ ID NO: 280, or SEQ ID NO: 281.

[0394] In some examples of any of the ABPCs described herein, the first antigen-binding domain includes a light chain variable domain comprising SEQ ID NO: 286, and a heavy chain variable domain comprising SEQ ID NO: 236, SEQ ID NO: 238, SEQ ID NO: 239, SEQ ID NO: 240, SEQ ID NO: 241, SEQ ID NO: 242, SEQ ID NO: 243, SEQ ID NO: 244, SEQ ID NO: 245, SEQ ID NO: 246, SEQ ID NO: 247, SEQ ID NO: 248, SEQ ID NO: 249, SEQ ID NO: 250, SEQ ID NO: 251, SEQ ID NO: 252, SEQ ID NO: 253, SEQ ID NO: 254, SEQ ID NO: 255, SEQ ID NO: 256, SEQ ID NO: 257, SEQ ID NO: 258, SEQ ID NO: 259, SEQ ID NO: 260, SEQ ID NO: 261, SEQ ID NO: 262, SEQ ID NO: 263, SEQ ID NO: 264, SEQ ID NO: 265, SEQ ID NO: 266, SEQ ID NO: 267, SEQ ID NO: 268, SEQ ID NO: 269, SEQ ID NO: 270, SEQ ID NO: 271, SEQ ID NO: 272, SEQ ID NO: 273, SEQ ID NO: 274, SEQ ID NO: 275, SEQ ID NO: 276, SEQ ID NO: 277, SEQ ID NO: 278, SEQ ID NO: 279, SEQ ID NO: 280, or SEQ ID NO: 281.

[0395] In some examples of any of the ABPCs described herein, the first antigen-binding domain includes a light chain variable domain comprising SEQ ID NO: 287, and a heavy chain variable domain comprising SEQ ID NO: 236, SEQ ID NO: 238, SEQ ID NO: 239, SEQ ID NO: 240, SEQ ID NO: 241, SEQ ID NO: 242, SEQ ID NO: 243, SEQ ID NO: 244, SEQ ID NO: 245, SEQ ID NO: 246, SEQ ID NO: 247, SEQ ID NO: 248, SEQ ID NO: 249, SEQ ID NO: 250, SEQ ID NO: 251, SEQ ID NO: 252, SEQ ID NO: 253, SEQ ID NO: 254, SEQ ID NO: 255, SEQ ID NO: 256, SEQ ID NO: 257, SEQ ID NO: 258, SEQ ID NO: 259, SEQ ID NO: 260, SEQ ID NO: 261, SEQ ID NO: 262, SEQ ID NO: 263, SEQ ID NO: 264, SEQ ID NO: 265, SEQ ID NO: 266, SEQ ID NO: 267, SEQ ID NO: 268, SEQ ID NO: 269, SEQ ID NO: 270, SEQ ID NO: 271, SEQ ID NO: 272, SEQ ID NO: 273, SEQ ID NO: 274, SEQ ID NO: 275, SEQ ID NO: 276, SEQ ID NO: 277, SEQ ID NO: 278, SEQ ID NO: 279, SEQ ID NO: 280, or SEQ ID NO: 281.

[0396] In some examples of any of the ABPCs described herein, the first antigen-binding domain includes a light chain variable domain comprising SEQ ID NO: 288, and a heavy chain variable domain comprising SEQ ID NO: 236, SEQ ID NO: 238, SEQ ID NO: 239, SEQ ID NO: 240, SEQ ID NO: 241, SEQ ID NO: 242, SEQ ID NO: 243, SEQ ID NO: 244, SEQ ID NO: 245, SEQ ID NO: 246, SEQ ID NO: 247, SEQ ID NO: 248, SEQ ID NO: 249, SEQ ID NO: 250, SEQ ID NO: 251, SEQ ID NO: 252, SEQ ID NO: 253, SEQ ID NO: 254, SEQ ID NO: 255, SEQ ID NO: 256, SEQ ID NO: 257, SEQ ID NO: 258, SEQ ID NO: 259, SEQ ID NO: 260, SEQ ID NO: 261, SEQ ID NO: 262, SEQ ID NO: 263, SEQ ID NO: 264, SEQ ID NO: 265, SEQ ID NO: 266, SEQ ID NO: 267, SEQ ID NO: 268, SEQ ID NO: 269, SEQ ID NO: 270, SEQ ID NO: 271, SEQ ID NO: 272, SEQ ID NO: 273, SEQ ID NO: 274, SEQ ID NO: 275, SEQ ID NO: 276, SEQ ID NO: 277, SEQ ID NO: 278, SEQ ID NO: 279, SEQ ID NO: 280, or SEQ ID NO: 281.

[0397] In some examples of any of the ABPCs described herein, the first antigen-binding domain includes a light chain variable domain comprising SEQ ID NO: 289, and a heavy chain variable domain comprising SEQ ID NO: 236, SEQ ID NO: 238, SEQ ID NO: 239, SEQ ID NO: 240, SEQ ID NO: 241, SEQ ID NO: 242, SEQ ID NO: 243, SEQ ID NO: 244, SEQ ID NO: 245, SEQ ID NO: 246, SEQ ID NO: 247, SEQ ID NO: 248, SEQ ID NO: 249, SEQ ID NO: 250, SEQ ID NO: 251, SEQ ID NO: 252, SEQ ID NO: 253, SEQ ID NO: 254, SEQ ID NO: 255, SEQ ID NO: 256, SEQ ID NO: 257, SEQ ID NO: 258, SEQ ID NO: 259, SEQ ID NO: 260, SEQ ID NO: 261, SEQ ID NO: 262, SEQ ID NO: 263, SEQ ID NO: 264, SEQ ID NO: 265, SEQ ID NO: 266, SEQ ID NO: 267, SEQ ID NO: 268, SEQ ID NO: 269, SEQ ID NO: 270, SEQ ID NO: 271, SEQ ID NO: 272, SEQ ID NO: 273, SEQ ID NO: 274, SEQ ID NO: 275, SEQ ID NO: 276, SEQ ID NO: 277, SEQ ID NO: 278, SEQ ID NO: 279, SEQ ID NO: 280, or SEQ ID NO: 281.

[0398] In some examples of any of the ABPCs described herein, the first antigen-binding domain includes a light chain variable domain comprising SEQ ID NO: 290, and a heavy chain variable domain comprising SEQ ID NO: 236, SEQ ID NO: 238, SEQ ID NO: 239, SEQ ID NO: 240, SEQ ID NO: 241, SEQ ID NO: 242, SEQ ID NO: 243, SEQ ID NO: 244, SEQ ID NO: 245, SEQ ID NO: 246, SEQ ID NO: 247, SEQ ID NO: 248, SEQ ID NO: 249, SEQ ID NO: 250, SEQ ID NO: 251, SEQ ID NO: 252, SEQ ID NO: 253, SEQ ID NO: 254, SEQ ID NO: 255, SEQ ID NO: 256, SEQ ID NO: 257, SEQ ID NO: 258, SEQ ID NO: 259, SEQ ID NO: 260, SEQ ID NO: 261, SEQ ID NO: 262, SEQ ID NO: 263, SEQ ID NO: 264, SEQ ID NO: 265, SEQ ID NO: 266, SEQ ID NO: 267, SEQ ID NO: 268, SEQ ID NO: 269, SEQ ID NO: 270, SEQ ID NO: 271, SEQ ID NO: 272, SEQ ID NO: 273, SEQ ID NO: 274, SEQ ID NO: 275, SEQ ID NO: 276, SEQ ID NO: 277, SEQ ID NO: 278, SEQ ID NO: 279, SEQ ID NO: 280, or SEQ ID NO: 281.

[0399] In some examples of any of the ABPCs described herein, the first antigen-binding domain includes a light chain variable domain comprising SEQ ID NO: 291, and a heavy chain variable domain comprising SEQ ID NO: 236, SEQ ID NO: 238, SEQ ID NO: 239, SEQ ID NO: 240, SEQ ID NO: 241, SEQ ID NO: 242, SEQ ID NO: 243, SEQ ID NO: 244, SEQ ID NO: 245, SEQ ID NO: 246, SEQ ID NO: 247, SEQ ID NO: 248, SEQ ID NO: 249, SEQ ID NO: 250, SEQ ID NO: 251, SEQ ID NO: 252, SEQ ID NO: 253, SEQ ID NO: 254, SEQ ID NO: 255, SEQ ID NO: 256, SEQ ID NO: 257, SEQ ID NO: 258, SEQ ID NO: 259, SEQ ID NO: 260, SEQ ID NO: 261, SEQ ID NO: 262, SEQ ID NO: 263, SEQ ID NO: 264, SEQ ID NO: 265, SEQ ID NO: 266, SEQ ID NO: 267, SEQ ID NO: 268, SEQ ID NO: 269, SEQ ID NO: 270, SEQ ID NO: 271, SEQ ID NO: 272, SEQ ID NO: 273, SEQ ID NO: 274, SEQ ID NO: 275, SEQ ID NO: 276, SEQ ID NO: 277, SEQ ID NO: 278, SEQ ID NO: 279, SEQ ID NO: 280, or SEQ ID NO: 281.

[0400] In some examples of any of the ABPCs described herein, the first antigen-binding domain includes a light chain variable domain comprising SEQ ID NO: 292, and a heavy chain variable domain comprising SEQ ID NO: 236, SEQ ID NO: 238, SEQ ID NO: 239, SEQ ID NO: 240, SEQ ID NO: 241, SEQ ID NO: 242, SEQ ID NO: 243, SEQ ID NO: 244, SEQ ID NO: 245, SEQ ID NO: 246, SEQ ID NO: 247, SEQ ID NO: 248, SEQ ID NO: 249, SEQ ID NO: 250, SEQ ID NO: 251, SEQ ID NO: 252, SEQ ID NO: 253, SEQ ID NO: 254, SEQ ID NO: 255, SEQ ID NO: 256, SEQ ID NO: 257, SEQ ID NO: 258, SEQ ID NO: 259, SEQ ID NO: 260, SEQ ID NO: 261, SEQ ID NO: 262, SEQ ID NO: 263, SEQ ID NO: 264, SEQ ID NO: 265, SEQ ID NO: 266, SEQ ID NO: 267, SEQ ID NO: 268, SEQ ID NO: 269, SEQ ID NO: 270, SEQ ID NO: 271, SEQ ID NO: 272, SEQ ID NO: 273, SEQ ID NO: 274, SEQ ID NO: 275, SEQ ID NO: 276, SEQ ID NO: 277, SEQ ID NO: 278, SEQ ID NO: 279, SEQ ID NO: 280, or SEQ ID NO: 281.

[0401] In some examples of any of the ABPCs described herein, the first antigen-binding domain includes a light chain variable domain comprising SEQ ID NO: 293, and a heavy chain variable domain comprising SEQ ID NO: 236, SEQ ID NO: 238, SEQ ID NO: 239, SEQ ID NO: 240, SEQ ID NO: 241, SEQ ID NO: 242, SEQ ID NO: 243, SEQ ID NO: 244, SEQ ID NO: 245, SEQ ID NO: 246, SEQ ID NO: 247, SEQ ID NO: 248, SEQ ID NO: 249, SEQ ID NO: 250, SEQ ID NO: 251, SEQ ID NO: 252, SEQ ID NO: 253, SEQ ID NO: 254, SEQ ID NO: 255, SEQ ID NO: 256, SEQ ID NO: 257, SEQ ID NO: 258, SEQ ID NO: 259, SEQ ID NO: 260, SEQ ID NO: 261, SEQ ID NO: 262, SEQ ID NO: 263, SEQ ID NO: 264, SEQ ID NO: 265, SEQ ID NO: 266, SEQ ID NO: 267, SEQ ID NO: 268, SEQ ID NO: 269, SEQ ID NO: 270, SEQ ID NO: 271, SEQ ID NO: 272, SEQ ID NO: 273, SEQ ID NO: 274, SEQ ID NO: 275, SEQ ID NO: 276, SEQ ID NO: 277, SEQ ID NO: 278, SEQ ID NO: 279, SEQ ID NO: 280, or SEQ ID NO: 281.

[0402] In some examples of any of the ABPCs described herein, the first antigen-binding domain includes a light chain variable domain comprising SEQ ID NO: 294, and a heavy chain variable domain comprising SEQ ID NO: 236, SEQ ID NO: 238, SEQ ID NO: 239, SEQ ID NO: 240, SEQ ID NO: 241, SEQ ID NO: 242, SEQ ID NO: 243, SEQ ID NO: 244, SEQ ID NO: 245, SEQ ID NO: 246, SEQ ID NO: 247, SEQ ID NO: 248, SEQ ID NO: 249, SEQ ID NO: 250, SEQ ID NO: 251, SEQ ID NO: 252, SEQ ID NO: 253, SEQ ID NO: 254, SEQ ID NO: 255, SEQ ID NO: 256, SEQ ID NO: 257, SEQ ID NO: 258, SEQ ID NO: 259, SEQ ID NO: 260, SEQ ID NO: 261, SEQ ID NO: 262, SEQ ID NO: 263, SEQ ID NO: 264, SEQ ID NO: 265, SEQ ID NO: 266, SEQ ID NO: 267, SEQ ID NO: 268, SEQ ID NO: 269, SEQ ID NO: 270, SEQ ID NO: 271, SEQ ID NO: 272, SEQ ID NO: 273, SEQ ID NO: 274, SEQ ID NO: 275, SEQ ID NO: 276, SEQ ID NO: 277, SEQ ID NO: 278, SEQ ID NO: 279, SEQ ID NO: 280, or SEQ ID NO: 281.

[0403] In some examples of any of the ABPCs described herein, the first antigen-binding domain includes a light chain variable domain comprising SEQ ID NO: 295, and a heavy chain variable domain comprising SEQ ID NO: 236, SEQ ID NO: 238, SEQ ID NO: 239, SEQ ID NO: 240, SEQ ID NO: 241, SEQ ID NO: 242, SEQ ID NO: 243, SEQ ID NO: 244, SEQ ID NO: 245, SEQ ID NO: 246, SEQ ID NO: 247, SEQ ID NO: 248, SEQ ID NO: 249, SEQ ID NO: 250, SEQ ID NO: 251, SEQ ID NO: 252, SEQ ID NO: 253, SEQ ID NO: 254, SEQ ID NO: 255, SEQ ID NO: 256, SEQ ID NO: 257, SEQ ID NO: 258, SEQ ID NO: 259, SEQ ID NO: 260, SEQ ID NO: 261, SEQ ID NO: 262, SEQ ID NO: 263, SEQ ID NO: 264, SEQ ID NO: 265, SEQ ID NO: 266, SEQ ID NO: 267, SEQ ID NO: 268, SEQ ID NO: 269, SEQ ID NO: 270, SEQ ID NO: 271, SEQ ID NO: 272, SEQ ID NO: 273, SEQ ID NO: 274, SEQ ID NO: 275, SEQ ID NO: 276, SEQ ID NO: 277, SEQ ID NO: 278, SEQ ID NO: 279, SEQ ID NO: 280, or SEQ ID NO: 281.

[0404] In some examples of any of the ABPCs described herein, the first antigen-binding domain includes a light chain variable domain comprising SEQ ID NO: 296, and a heavy chain variable domain comprising SEQ ID NO: 236, SEQ ID NO: 238, SEQ ID NO: 239, SEQ ID NO: 240, SEQ ID NO: 241, SEQ ID NO: 242, SEQ ID NO: 243, SEQ ID NO: 244, SEQ ID NO: 245, SEQ ID NO: 246, SEQ ID NO: 247, SEQ ID NO: 248, SEQ ID NO: 249, SEQ ID NO: 250, SEQ ID NO: 251, SEQ ID NO: 252, SEQ ID NO: 253, SEQ ID NO: 254, SEQ ID NO: 255, SEQ ID NO: 256, SEQ ID NO: 257, SEQ ID NO: 258, SEQ ID NO: 259, SEQ ID NO: 260, SEQ ID NO: 261, SEQ ID NO: 262, SEQ ID NO: 263, SEQ ID NO: 264, SEQ ID NO: 265, SEQ ID NO: 266, SEQ ID NO: 267, SEQ ID NO: 268, SEQ ID NO: 269, SEQ ID NO: 270, SEQ ID NO: 271, SEQ ID NO: 272, SEQ ID NO: 273, SEQ ID NO: 274, SEQ ID NO: 275, SEQ ID NO: 276, SEQ ID NO: 277, SEQ ID NO: 278, SEQ ID NO: 279, SEQ ID NO: 280, or SEQ ID NO: 281.

[0405] In some examples of any of the ABPCs described herein, the first antigen-binding domain includes a light chain variable domain comprising SEQ ID NO: 297, and a heavy chain variable domain comprising SEQ ID NO: 236, SEQ ID NO: 238, SEQ ID NO: 239, SEQ ID NO: 240, SEQ ID NO: 241, SEQ ID NO: 242, SEQ ID NO: 243, SEQ ID NO: 244, SEQ ID NO: 245, SEQ ID NO: 246, SEQ ID NO: 247, SEQ ID NO: 248, SEQ ID NO: 249, SEQ ID NO: 250, SEQ ID NO: 251, SEQ ID NO: 252, SEQ ID NO: 253, SEQ ID NO: 254, SEQ ID NO: 255, SEQ ID NO: 256, SEQ ID NO: 257, SEQ ID NO: 258, SEQ ID NO: 259, SEQ ID NO: 260, SEQ ID NO: 261, SEQ ID NO: 262, SEQ ID NO: 263, SEQ ID NO: 264, SEQ ID NO: 265, SEQ ID NO: 266, SEQ ID NO: 267, SEQ ID NO: 268, SEQ ID NO: 269, SEQ ID NO: 270, SEQ ID NO: 271, SEQ ID NO: 272, SEQ ID NO: 273, SEQ ID NO: 274, SEQ ID NO: 275, SEQ ID NO: 276, SEQ ID NO: 277, SEQ ID NO: 278, SEQ ID NO: 279, SEQ ID NO: 280, or SEQ ID NO: 281.

[0406] In some examples of any of the ABPCs described herein, the first antigen-binding domain includes a light chain variable domain comprising SEQ ID NO: 298, and a heavy chain variable domain comprising SEQ ID NO: 236, SEQ ID NO: 238, SEQ ID NO: 239, SEQ ID NO: 240, SEQ ID NO: 241, SEQ ID NO: 242, SEQ ID NO: 243, SEQ ID NO: 244, SEQ ID NO: 245, SEQ ID NO: 246, SEQ ID NO: 247, SEQ ID NO: 248, SEQ ID NO: 249, SEQ ID NO: 250, SEQ ID NO: 251, SEQ ID NO: 252, SEQ ID NO: 253, SEQ ID NO: 254, SEQ ID NO: 255, SEQ ID NO: 256, SEQ ID NO: 257, SEQ ID NO: 258, SEQ ID NO: 259, SEQ ID NO: 260, SEQ ID NO: 261, SEQ ID NO: 262, SEQ ID NO: 263, SEQ ID NO: 264, SEQ ID NO: 265, SEQ ID NO: 266, SEQ ID NO: 267, SEQ ID NO: 268, SEQ ID NO: 269, SEQ ID NO: 270, SEQ ID NO: 271, SEQ ID NO: 272, SEQ ID NO: 273, SEQ ID NO: 274, SEQ ID NO: 275, SEQ ID NO: 276, SEQ ID NO: 277, SEQ ID NO: 278, SEQ ID NO: 279, SEQ ID NO: 280, or SEQ ID NO: 281.

[0407] In some examples of any of the ABPCs described herein, the first antigen-binding domain includes a light chain variable domain comprising SEQ ID NO: 299, and a heavy chain variable domain comprising SEQ ID NO: 236, SEQ ID NO: 238, SEQ ID NO: 239, SEQ ID NO: 240, SEQ ID NO: 241, SEQ ID NO: 242, SEQ ID NO: 243, SEQ ID NO: 244, SEQ ID NO: 245, SEQ ID NO: 246, SEQ ID NO: 247, SEQ ID NO: 248, SEQ ID NO: 249, SEQ ID NO: 250, SEQ ID NO: 251, SEQ ID NO: 252, SEQ ID NO: 253, SEQ ID NO: 254, SEQ ID NO: 255, SEQ ID NO: 256, SEQ ID NO: 257, SEQ ID NO: 258, SEQ ID NO: 259, SEQ ID NO: 260, SEQ ID NO: 261, SEQ ID NO: 262, SEQ ID NO: 263, SEQ ID NO: 264, SEQ ID NO: 265, SEQ ID NO: 266, SEQ ID NO: 267, SEQ ID NO: 268, SEQ ID NO: 269, SEQ ID NO: 270, SEQ ID NO: 271, SEQ ID NO: 272, SEQ ID NO: 273, SEQ ID NO: 274, SEQ ID NO: 275, SEQ ID NO: 276, SEQ ID NO: 277, SEQ ID NO: 278, SEQ ID NO: 279, SEQ ID NO: 280, or SEQ ID NO: 281.

[0408] In some examples of any of the ABPCs described herein, the first antigen-binding domain includes a light chain variable domain comprising SEQ ID NO: 300, and a heavy chain variable domain comprising SEQ ID NO: 236, SEQ ID NO: 238, SEQ ID NO: 239, SEQ ID NO: 240, SEQ ID NO: 241, SEQ ID NO: 242, SEQ ID NO: 243, SEQ ID NO: 244, SEQ ID NO: 245, SEQ ID NO: 246, SEQ ID NO: 247, SEQ ID NO: 248, SEQ ID NO: 249, SEQ ID NO: 250, SEQ ID NO: 251, SEQ ID NO: 252, SEQ ID NO: 253, SEQ ID NO: 254, SEQ ID NO: 255, SEQ ID NO: 256, SEQ ID NO: 257, SEQ ID NO: 258, SEQ ID NO: 259, SEQ ID NO: 260, SEQ ID NO: 261, SEQ ID NO: 262, SEQ ID NO: 263, SEQ ID NO: 264, SEQ ID NO: 265, SEQ ID NO: 266, SEQ ID NO: 267, SEQ ID NO: 268, SEQ ID NO: 269, SEQ ID NO: 270, SEQ ID NO: 271, SEQ ID NO: 272, SEQ ID NO: 273, SEQ ID NO: 274, SEQ ID NO: 275, SEQ ID NO: 276, SEQ ID NO: 277, SEQ ID NO: 278, SEQ ID NO: 279, SEQ ID NO: 280, or SEQ ID NO: 281.

[0409] In some examples of any of the ABPCs described herein, the first antigen-binding domain includes a light chain variable domain comprising SEQ ID NO: 301, and a heavy chain variable domain comprising SEQ ID NO: 236, SEQ ID NO: 238, SEQ ID NO: 239, SEQ ID NO: 240, SEQ ID NO: 241, SEQ ID NO: 242, SEQ ID NO: 243, SEQ ID NO: 244, SEQ ID NO: 245, SEQ ID NO: 246, SEQ ID NO: 247, SEQ ID NO: 248, SEQ ID NO: 249, SEQ ID NO: 250, SEQ ID NO: 251, SEQ ID NO: 252, SEQ ID NO: 253, SEQ ID NO: 254, SEQ ID NO: 255, SEQ ID NO: 256, SEQ ID NO: 257, SEQ ID NO: 258, SEQ ID NO: 259, SEQ ID NO: 260, SEQ ID NO: 261, SEQ ID NO: 262, SEQ ID NO: 263, SEQ ID NO: 264, SEQ ID NO: 265, SEQ ID NO: 266, SEQ ID NO: 267, SEQ ID NO: 268, SEQ ID NO: 269, SEQ ID NO: 270, SEQ ID NO: 271, SEQ ID NO: 272, SEQ ID NO: 273, SEQ ID NO: 274, SEQ ID NO: 275, SEQ ID NO: 276, SEQ ID NO: 277, SEQ ID NO: 278, SEQ ID NO: 279, SEQ ID NO: 280, or SEQ ID NO: 281.

[0410] In some examples of any of the ABPCs described herein, the first antigen-binding domain includes a light chain variable domain comprising SEQ ID NO: 302, and a heavy chain variable domain comprising SEQ ID NO: 236, SEQ ID NO: 238, SEQ ID NO: 239, SEQ ID NO: 240, SEQ ID NO: 241, SEQ ID NO: 242, SEQ ID NO: 243, SEQ ID NO: 244, SEQ ID NO: 245, SEQ ID NO: 246, SEQ ID NO: 247, SEQ ID NO: 248, SEQ ID NO: 249, SEQ ID NO: 250, SEQ ID NO: 251, SEQ ID NO: 252, SEQ ID NO: 253, SEQ ID NO: 254, SEQ ID NO: 255, SEQ ID NO: 256, SEQ ID NO: 257, SEQ ID NO: 258, SEQ ID NO: 259, SEQ ID NO: 260, SEQ ID NO: 261, SEQ ID NO: 262, SEQ ID NO: 263, SEQ ID NO: 264, SEQ ID NO: 265, SEQ ID NO: 266, SEQ ID NO: 267, SEQ ID NO: 268, SEQ ID NO: 269, SEQ ID NO: 270, SEQ ID NO: 271, SEQ ID NO: 272, SEQ ID NO: 273, SEQ ID NO: 274, SEQ ID NO: 275, SEQ ID NO: 276, SEQ ID NO: 277, SEQ ID NO: 278, SEQ ID NO: 279, SEQ ID NO: 280, or SEQ ID NO: 281.

[0411] In some examples of any of the ABPCs described herein, the first antigen-binding domain includes a light chain variable domain comprising SEQ ID NO: 303, and a heavy chain variable domain comprising SEQ ID NO: 236, SEQ ID NO: 238, SEQ ID NO: 239, SEQ ID NO: 240, SEQ ID NO: 241, SEQ ID NO: 242, SEQ ID NO: 243, SEQ ID NO: 244, SEQ ID NO: 245, SEQ ID NO: 246, SEQ ID NO: 247, SEQ ID NO: 248, SEQ ID NO: 249, SEQ ID NO: 250, SEQ ID NO: 251, SEQ ID NO: 252, SEQ ID NO: 253, SEQ ID NO: 254, SEQ ID NO: 255, SEQ ID NO: 256, SEQ ID NO: 257, SEQ ID NO: 258, SEQ ID NO: 259, SEQ ID NO: 260, SEQ ID NO: 261, SEQ ID NO: 262, SEQ ID NO: 263, SEQ ID NO: 264, SEQ ID NO: 265, SEQ ID NO: 266, SEQ ID NO: 267, SEQ ID NO: 268, SEQ ID NO: 269, SEQ ID NO: 270, SEQ ID NO: 271, SEQ ID NO: 272, SEQ ID NO: 273, SEQ ID NO: 274, SEQ ID NO: 275, SEQ ID NO: 276, SEQ ID NO: 277, SEQ ID NO: 278, SEQ ID NO: 279, SEQ ID NO: 280, or SEQ ID NO: 281.

[0412] In some examples of any of the ABPCs described herein, the first antigen-binding domain includes a light chain variable domain comprising SEQ ID NO: 304, and a heavy chain variable domain comprising SEQ ID NO: 236, SEQ ID NO: 238, SEQ ID NO: 239, SEQ ID NO: 240, SEQ ID NO: 241, SEQ ID NO: 242, SEQ ID NO: 243, SEQ ID NO: 244, SEQ ID NO: 245, SEQ ID NO: 246, SEQ ID NO: 247, SEQ ID NO: 248, SEQ ID NO: 249, SEQ ID NO: 250, SEQ ID NO: 251, SEQ ID NO: 252, SEQ ID NO: 253, SEQ ID NO: 254, SEQ ID NO: 255, SEQ ID NO: 256, SEQ ID NO: 257, SEQ ID NO: 258, SEQ ID NO: 259, SEQ ID NO: 260, SEQ ID NO: 261, SEQ ID NO: 262, SEQ ID NO: 263, SEQ ID NO: 264, SEQ ID NO: 265, SEQ ID NO: 266, SEQ ID NO: 267, SEQ ID NO: 268, SEQ ID NO: 269, SEQ ID NO: 270, SEQ ID NO: 271, SEQ ID NO: 272, SEQ ID NO: 273, SEQ ID NO: 274, SEQ ID NO: 275, SEQ ID NO: 276, SEQ ID NO: 277, SEQ ID NO: 278, SEQ ID NO: 279, SEQ ID NO: 280, or SEQ ID NO: 281.

[0413] In some examples of any of the ABPCs described herein, the first antigen-binding domain includes a light chain variable domain comprising SEQ ID NO: 305, and a heavy chain variable domain comprising SEQ ID NO: 236, SEQ ID NO: 238, SEQ ID NO: 239, SEQ ID NO: 240, SEQ ID NO: 241, SEQ ID NO: 242, SEQ ID NO: 243, SEQ ID NO: 244, SEQ ID NO: 245, SEQ ID NO: 246, SEQ ID NO: 247, SEQ ID NO: 248, SEQ ID NO: 249, SEQ ID NO: 250, SEQ ID NO: 251, SEQ ID NO: 252, SEQ ID NO: 253, SEQ ID NO: 254, SEQ ID NO: 255, SEQ ID NO: 256, SEQ ID NO: 257, SEQ ID NO: 258, SEQ ID NO: 259, SEQ ID NO: 260, SEQ ID NO: 261, SEQ ID NO: 262, SEQ ID NO: 263, SEQ ID NO: 264, SEQ ID NO: 265, SEQ ID NO: 266, SEQ ID NO: 267, SEQ ID NO: 268, SEQ ID NO: 269, SEQ ID NO: 270, SEQ ID NO: 271, SEQ ID NO: 272, SEQ ID NO: 273, SEQ ID NO: 274, SEQ ID NO: 275, SEQ ID NO: 276, SEQ ID NO: 277, SEQ ID NO: 278, SEQ ID NO: 279, SEQ ID NO: 280, or SEQ ID NO: 281.

[0414] In some examples of any of the ABPCs described herein, the first antigen-binding domain includes a light chain variable domain comprising SEQ ID NO: 306, and a heavy chain variable domain comprising SEQ ID NO: 236, SEQ ID NO: 238, SEQ ID NO: 239, SEQ ID NO: 240, SEQ ID NO: 241, SEQ ID NO: 242, SEQ ID NO: 243, SEQ ID NO: 244, SEQ ID NO: 245, SEQ ID NO: 246, SEQ ID NO: 247, SEQ ID NO: 248, SEQ ID NO: 249, SEQ ID NO: 250, SEQ ID NO: 251, SEQ ID NO: 252, SEQ ID NO: 253, SEQ ID NO: 254, SEQ ID NO: 255, SEQ ID NO: 256, SEQ ID NO: 257, SEQ ID NO: 258, SEQ ID NO: 259, SEQ ID NO: 260, SEQ ID NO: 261, SEQ ID NO: 262, SEQ ID NO: 263, SEQ ID NO: 264, SEQ ID NO: 265, SEQ ID NO: 266, SEQ ID NO: 267, SEQ ID NO: 268, SEQ ID NO: 269, SEQ ID NO: 270, SEQ ID NO: 271, SEQ ID NO: 272, SEQ ID NO: 273, SEQ ID NO: 274, SEQ ID NO: 275, SEQ ID NO: 276, SEQ ID NO: 277, SEQ ID NO: 278, SEQ ID NO: 279, SEQ ID NO: 280, or SEQ ID NO: 281.

[0415] In some examples of any of the ABPCs described herein, the first antigen-binding domain includes a light chain variable domain comprising SEQ ID NO: 307, and a heavy chain variable domain comprising SEQ ID NO: 236, SEQ ID NO: 238, SEQ ID NO: 239, SEQ ID NO: 240, SEQ ID NO: 241, SEQ ID NO: 242, SEQ ID NO: 243, SEQ ID NO: 244, SEQ ID NO: 245, SEQ ID NO: 246, SEQ ID NO: 247, SEQ ID NO: 248, SEQ ID NO: 249, SEQ ID NO: 250, SEQ ID NO: 251, SEQ ID NO: 252, SEQ ID NO: 253, SEQ ID NO: 254, SEQ ID NO: 255, SEQ ID NO: 256, SEQ ID NO: 257, SEQ ID NO: 258, SEQ ID NO: 259, SEQ ID NO: 260, SEQ ID NO: 261, SEQ ID NO: 262, SEQ ID NO: 263, SEQ ID NO: 264, SEQ ID NO: 265, SEQ ID NO: 266, SEQ ID NO: 267, SEQ ID NO: 268, SEQ ID NO: 269, SEQ ID NO: 270, SEQ ID NO: 271, SEQ ID NO: 272, SEQ ID NO: 273, SEQ ID NO: 274, SEQ ID NO: 275, SEQ ID NO: 276, SEQ ID NO: 277, SEQ ID NO: 278, SEQ ID NO: 279, SEQ ID NO: 280, or SEQ ID NO: 281.

[0416] In some examples of any of the ABPCs described herein, the first antigen-binding domain includes a heavy chain variable domain of SEQ ID NO: 308, SEQ ID NO: 309, SEQ ID NO: 310, SEQ ID NO: 311, SEQ ID NO: 312, SEQ ID NO: 313, SEQ ID NO: 314, SEQ ID NO: 315, SEQ ID NO: 316, SEQ ID NO: 317, SEQ ID NO: 318, SEQ ID NO: 319, SEQ ID NO: 320, SEQ ID NO: 321, SEQ ID NO: 322, SEQ ID NO: 323, SEQ ID NO: 324, SEQ ID NO: 325, SEQ ID NO: 326, SEQ ID NO: 327, SEQ ID NO: 328, SEQ ID NO: 329, SEQ ID NO: 330, SEQ ID NO: 331. SEQ ID NO: 332, or SEQ ID NO: 333.

[0417] In some examples of any of the ABPCs described herein, the first antigen-binding domain includes a heavy chain variable domain comprising SEQ ID NO: 308, and a light chain variable domain comprising SEQ ID NO: 237, SEQ ID NO: 282, SEQ ID NO: 283, SEQ ID NO: 284, SEQ ID NO: 285, SEQ ID NO: 286, SEQ ID NO: 287, SEQ ID NO: 288, SEQ ID NO: 289, SEQ ID NO: 290, SEQ ID NO: 291, SEQ ID NO: 292, SEQ ID NO: 293, SEQ ID NO: 294, SEQ ID NO: 295, SEQ ID NO: 296, SEQ ID NO: 297, SEQ ID NO: 298, SEQ ID NO: 299, SEQ ID NO: 300, SEQ ID NO: 301, SEQ ID NO: 302, SEQ ID NO: 303, SEQ ID NO: 304, SEQ ID NO: 305, SEQ ID NO: 306, or SEQ ID NO: 307.

[0418] In some examples of any of the ABPCs described herein, the first antigen-binding domain includes a heavy chain variable domain comprising SEQ ID NO: 309, and a light chain variable domain comprising SEQ ID NO: 237, SEQ ID NO: 282, SEQ ID NO: 283, SEQ ID NO: 284, SEQ ID NO: 285, SEQ ID NO: 286, SEQ ID NO: 287, SEQ ID NO: 288, SEQ ID NO: 289, SEQ ID NO: 290, SEQ ID NO: 291, SEQ ID NO: 292, SEQ ID NO: 293, SEQ ID NO: 294, SEQ ID NO: 295, SEQ ID NO: 296, SEQ ID NO: 297, SEQ ID NO: 298, SEQ ID NO: 299, SEQ ID NO: 300, SEQ ID NO: 301, SEQ ID NO: 302, SEQ ID NO: 303, SEQ ID NO: 304, SEQ ID NO: 305, SEQ ID NO: 306, or SEQ ID NO: 307.

[0419] In some examples of any of the ABPCs described herein, the first antigen-binding domain includes a heavy chain variable domain comprising SEQ ID NO: 310, and a light chain variable domain comprising SEQ ID NO: 237, SEQ ID NO: 282, SEQ ID NO: 283, SEQ ID NO: 284, SEQ ID NO: 285, SEQ ID NO: 286, SEQ ID NO: 287, SEQ ID NO: 288, SEQ ID NO: 289, SEQ ID NO: 290, SEQ ID NO: 291, SEQ ID NO: 292, SEQ ID NO: 293, SEQ ID NO: 294, SEQ ID NO: 295, SEQ ID NO: 296, SEQ ID NO: 297, SEQ ID NO: 298, SEQ ID NO: 299, SEQ ID NO: 300, SEQ ID NO: 301, SEQ ID NO: 302, SEQ ID NO: 303, SEQ ID NO: 304, SEQ ID NO: 305, SEQ ID NO: 306, or SEQ ID NO: 307.

[0420] In some examples of any of the ABPCs described herein, the first antigen-binding domain includes a heavy chain variable domain comprising SEQ ID NO: 311, and a light chain variable domain comprising SEQ ID NO: 237, SEQ ID NO: 282, SEQ ID NO: 283, SEQ ID NO: 284, SEQ ID NO: 285, SEQ ID NO: 286, SEQ ID NO: 287, SEQ ID NO: 288, SEQ ID NO: 289, SEQ ID NO: 290, SEQ ID NO: 291, SEQ ID NO: 292, SEQ ID NO: 293, SEQ ID NO: 294, SEQ ID NO: 295, SEQ ID NO: 296, SEQ ID NO: 297, SEQ ID NO: 298, SEQ ID NO: 299, SEQ ID NO: 300, SEQ ID NO: 301, SEQ ID NO: 302, SEQ ID NO: 303, SEQ ID NO: 304, SEQ ID NO: 305, SEQ ID NO: 306, or SEQ ID NO: 307.

[0421] In some examples of any of the ABPCs described herein, the first antigen-binding domain includes a heavy chain variable domain comprising SEQ ID NO: 312, and a light chain variable domain comprising SEQ ID NO: 237, SEQ ID NO: 282, SEQ ID NO: 283, SEQ ID NO: 284, SEQ ID NO: 285, SEQ ID NO: 286, SEQ ID NO: 287, SEQ ID NO: 288, SEQ ID NO: 289, SEQ ID NO: 290, SEQ ID NO: 291, SEQ ID NO: 292, SEQ ID NO: 293, SEQ ID NO: 294, SEQ ID NO: 295, SEQ ID NO: 296, SEQ ID NO: 297, SEQ ID NO: 298, SEQ ID NO: 299, SEQ ID NO: 300, SEQ ID NO: 301, SEQ ID NO: 302, SEQ ID NO: 303, SEQ ID NO: 304, SEQ ID NO: 305, SEQ ID NO: 306, or SEQ ID NO: 307.

[0422] In some examples of any of the ABPCs described herein, the first antigen-binding domain includes a heavy chain variable domain comprising SEQ ID NO: 313, and a light chain variable domain comprising SEQ ID NO: 237, SEQ ID NO: 282, SEQ ID NO: 283, SEQ ID NO: 284, SEQ ID NO: 285, SEQ ID NO: 286, SEQ ID NO: 287, SEQ ID NO: 288, SEQ ID NO: 289, SEQ ID NO: 290, SEQ ID NO: 291, SEQ ID NO: 292, SEQ ID NO: 293, SEQ ID NO: 294, SEQ ID NO: 295, SEQ ID NO: 296, SEQ ID NO: 297, SEQ ID NO: 298, SEQ ID NO: 299, SEQ ID NO: 300, SEQ ID NO: 301, SEQ ID NO: 302, SEQ ID NO: 303, SEQ ID NO: 304, SEQ ID NO: 305, SEQ ID NO: 306, or SEQ ID NO: 307.

[0423] In some examples of any of the ABPCs described herein, the first antigen-binding domain includes a heavy chain variable domain comprising SEQ ID NO: 314, and a light chain variable domain comprising SEQ ID NO: 237, SEQ ID NO: 282, SEQ ID NO: 283, SEQ ID NO: 284, SEQ ID NO: 285, SEQ ID NO: 286, SEQ ID NO: 287, SEQ ID NO: 288, SEQ ID NO: 289, SEQ ID NO: 290, SEQ ID NO: 291, SEQ ID NO: 292, SEQ ID NO: 293, SEQ ID NO: 294, SEQ ID NO: 295, SEQ ID NO: 296, SEQ ID NO: 297, SEQ ID NO: 298, SEQ ID NO: 299, SEQ ID NO: 300, SEQ ID NO: 301, SEQ ID NO: 302, SEQ ID NO: 303, SEQ ID NO: 304, SEQ ID NO: 305, SEQ ID NO: 306, or SEQ ID NO: 307.

[0424] In some examples of any of the ABPCs described herein, the first antigen-binding domain includes a heavy chain variable domain comprising SEQ ID NO: 315, and a light chain variable domain comprising SEQ ID NO: 237, SEQ ID NO: 282, SEQ ID NO: 283, SEQ ID NO: 284, SEQ ID NO: 285, SEQ ID NO: 286, SEQ ID NO: 287, SEQ ID NO: 288, SEQ ID NO: 289, SEQ ID NO: 290, SEQ ID NO: 291, SEQ ID NO: 292, SEQ ID NO: 293, SEQ ID NO: 294, SEQ ID NO: 295, SEQ ID NO: 296, SEQ ID NO: 297, SEQ ID NO: 298, SEQ ID NO: 299, SEQ ID NO: 300, SEQ ID NO: 301, SEQ ID NO: 302, SEQ ID NO: 303, SEQ ID NO: 304, SEQ ID NO: 305, SEQ ID NO: 306, or SEQ ID NO: 307.

[0425] In some examples of any of the ABPCs described herein, the first antigen-binding domain includes a heavy chain variable domain comprising SEQ ID NO: 316, and a light chain variable domain comprising SEQ ID NO: 237, SEQ ID NO: 282, SEQ ID NO: 283, SEQ ID NO: 284, SEQ ID NO: 285, SEQ ID NO: 286, SEQ ID NO: 287, SEQ ID NO: 288, SEQ ID NO: 289, SEQ ID NO: 290, SEQ ID NO: 291, SEQ ID NO: 292, SEQ ID NO: 293, SEQ ID NO: 294, SEQ ID NO: 295, SEQ ID NO: 296, SEQ ID NO: 297, SEQ ID NO: 298, SEQ ID NO: 299, SEQ ID NO: 300, SEQ ID NO: 301, SEQ ID NO: 302, SEQ ID NO: 303, SEQ ID NO: 304, SEQ ID NO: 305, SEQ ID NO: 306, or SEQ ID NO: 307.

[0426] In some examples of any of the ABPCs described herein, the first antigen-binding domain includes a heavy chain variable domain comprising SEQ ID NO: 317, and a light chain variable domain comprising SEQ ID NO: 237, SEQ ID NO: 282, SEQ ID NO: 283, SEQ ID NO: 284, SEQ ID NO: 285, SEQ ID NO: 286, SEQ ID NO: 287, SEQ ID NO: 288, SEQ ID NO: 289, SEQ ID NO: 290, SEQ ID NO: 291, SEQ ID NO: 292, SEQ ID NO: 293, SEQ ID NO: 294, SEQ ID NO: 295, SEQ ID NO: 296, SEQ ID NO: 297, SEQ ID NO: 298, SEQ ID NO: 299, SEQ ID NO: 300, SEQ ID NO: 301, SEQ ID NO: 302, SEQ ID NO: 303, SEQ ID NO: 304, SEQ ID NO: 305, SEQ ID NO: 306, or SEQ ID NO: 307.

[0427] In some examples of any of the ABPCs described herein, the first antigen-binding domain includes a heavy chain variable domain comprising SEQ ID NO: 318, and a light chain variable domain comprising SEQ ID NO: 237, SEQ ID NO: 282, SEQ ID NO: 283, SEQ ID NO: 284, SEQ ID NO: 285, SEQ ID NO: 286, SEQ ID NO: 287, SEQ ID NO: 288, SEQ ID NO: 289, SEQ ID NO: 290, SEQ ID NO: 291, SEQ ID NO: 292, SEQ ID NO: 293, SEQ ID NO: 294, SEQ ID NO: 295, SEQ ID NO: 296, SEQ ID NO: 297, SEQ ID NO: 298, SEQ ID NO: 299, SEQ ID NO: 300, SEQ ID NO: 301, SEQ ID NO: 302, SEQ ID NO: 303, SEQ ID NO: 304, SEQ ID NO: 305, SEQ ID NO: 306, or SEQ ID NO: 307.

[0428] In some examples of any of the ABPCs described herein, the first antigen-binding domain includes a heavy chain variable domain comprising SEQ ID NO: 319, and a light chain variable domain comprising SEQ ID NO: 237, SEQ ID NO: 282, SEQ ID NO: 283, SEQ ID NO: 284, SEQ ID NO: 285, SEQ ID NO: 286, SEQ ID NO: 287, SEQ ID NO: 288, SEQ ID NO: 289, SEQ ID NO: 290, SEQ ID NO: 291, SEQ ID NO: 292, SEQ ID NO: 293, SEQ ID NO: 294, SEQ ID NO: 295, SEQ ID NO: 296, SEQ ID NO: 297, SEQ ID NO: 298, SEQ ID NO: 299, SEQ ID NO: 300, SEQ ID NO: 301, SEQ ID NO: 302, SEQ ID NO: 303, SEQ ID NO: 304, SEQ ID NO: 305, SEQ ID NO: 306, or SEQ ID NO: 307.

[0429] In some examples of any of the ABPCs described herein, the first antigen-binding domain includes a heavy chain variable domain comprising SEQ ID NO: 320, and a light chain variable domain comprising SEQ ID NO: 237, SEQ ID NO: 282, SEQ ID NO: 283, SEQ ID NO: 284, SEQ ID NO: 285, SEQ ID NO: 286, SEQ ID NO: 287, SEQ ID NO: 288, SEQ ID NO: 289, SEQ ID NO: 290, SEQ ID NO: 291, SEQ ID NO: 292, SEQ ID NO: 293, SEQ ID NO: 294, SEQ ID NO: 295, SEQ ID NO: 296, SEQ ID NO: 297, SEQ ID NO: 298, SEQ ID NO: 299, SEQ ID NO: 300, SEQ ID NO: 301, SEQ ID NO: 302, SEQ ID NO: 303, SEQ ID NO: 304, SEQ ID NO: 305, SEQ ID NO: 306, or SEQ ID NO: 307.

[0430] In some examples of any of the ABPCs described herein, the first antigen-binding domain includes a heavy chain variable domain comprising SEQ ID NO: 321, and a light chain variable domain comprising SEQ ID NO: 237, SEQ ID NO: 282, SEQ ID NO: 283, SEQ ID NO: 284, SEQ ID NO: 285, SEQ ID NO: 286, SEQ ID NO: 287, SEQ ID NO: 288, SEQ ID NO: 289, SEQ ID NO: 290, SEQ ID NO: 291, SEQ ID NO: 292, SEQ ID NO: 293, SEQ ID NO: 294, SEQ ID NO: 295, SEQ ID NO: 296, SEQ ID NO: 297, SEQ ID NO: 298, SEQ ID NO: 299, SEQ ID NO: 300, SEQ ID NO: 301, SEQ ID NO: 302, SEQ ID NO: 303, SEQ ID NO: 304, SEQ ID NO: 305, SEQ ID NO: 306, or SEQ ID NO: 307.

[0431] In some examples of any of the ABPCs described herein, the first antigen-binding domain includes a heavy chain variable domain comprising SEQ ID NO: 322, and a light chain variable domain comprising SEQ ID NO: 237, SEQ ID NO: 282, SEQ ID NO: 283, SEQ ID NO: 284, SEQ ID NO: 285, SEQ ID NO: 286, SEQ ID NO: 287, SEQ ID NO: 288, SEQ ID NO: 289, SEQ ID NO: 290, SEQ ID NO: 291, SEQ ID NO: 292, SEQ ID NO: 293, SEQ ID NO: 294, SEQ ID NO: 295, SEQ ID NO: 296, SEQ ID NO: 297, SEQ ID NO: 298, SEQ ID NO: 299, SEQ ID NO: 300, SEQ ID NO: 301, SEQ ID NO: 302, SEQ ID NO: 303, SEQ ID NO: 304, SEQ ID NO: 305, SEQ ID NO: 306, or SEQ ID NO: 307.

[0432] In some examples of any of the ABPCs described herein, the first antigen-binding domain includes a heavy chain variable domain comprising SEQ ID NO: 323, and a light chain variable domain comprising SEQ ID NO: 237, SEQ ID NO: 282, SEQ ID NO: 283, SEQ ID NO: 284, SEQ ID NO: 285, SEQ ID NO: 286, SEQ ID NO: 287, SEQ ID NO: 288, SEQ ID NO: 289, SEQ ID NO: 290, SEQ ID NO: 291, SEQ ID NO: 292, SEQ ID NO: 293, SEQ ID NO: 294, SEQ ID NO: 295, SEQ ID NO: 296, SEQ ID NO: 297, SEQ ID NO: 298, SEQ ID NO: 299, SEQ ID NO: 300, SEQ ID NO: 301, SEQ ID NO: 302, SEQ ID NO: 303, SEQ ID NO: 304, SEQ ID NO: 305, SEQ ID NO: 306, or SEQ ID NO: 307.

[0433] In some examples of any of the ABPCs described herein, the first antigen-binding domain includes a heavy chain variable domain comprising SEQ ID NO: 324, and a light chain variable domain comprising SEQ ID NO: 237, SEQ ID NO: 282, SEQ ID NO: 283, SEQ ID NO: 284, SEQ ID NO: 285, SEQ ID NO: 286, SEQ ID NO: 287, SEQ ID NO: 288, SEQ ID NO: 289, SEQ ID NO: 290, SEQ ID NO: 291, SEQ ID NO: 292, SEQ ID NO: 293, SEQ ID NO: 294, SEQ ID NO: 295, SEQ ID NO: 296, SEQ ID NO: 297, SEQ ID NO: 298, SEQ ID NO: 299, SEQ ID NO: 300, SEQ ID NO: 301, SEQ ID NO: 302, SEQ ID NO: 303, SEQ ID NO: 304, SEQ ID NO: 305, SEQ ID NO: 306, or SEQ ID NO: 307.

[0434] In some examples of any of the ABPCs described herein, the first antigen-binding domain includes a heavy chain variable domain comprising SEQ ID NO: 325, and a light chain variable domain comprising SEQ ID NO: 237, SEQ ID NO: 282, SEQ ID NO: 283, SEQ ID NO: 284, SEQ ID NO: 285, SEQ ID NO: 286, SEQ ID NO: 287, SEQ ID NO: 288, SEQ ID NO: 289, SEQ ID NO: 290, SEQ ID NO: 291, SEQ ID NO: 292, SEQ ID NO: 293, SEQ ID NO: 294, SEQ ID NO: 295, SEQ ID NO: 296, SEQ ID NO: 297, SEQ ID NO: 298, SEQ ID NO: 299, SEQ ID NO: 300, SEQ ID NO: 301, SEQ ID NO: 302, SEQ ID NO: 303, SEQ ID NO: 304, SEQ ID NO: 305, SEQ ID NO: 306, or SEQ ID NO: 307.

[0435] In some examples of any of the ABPCs described herein, the first antigen-binding domain includes a heavy chain variable domain comprising SEQ ID NO: 326, and a light chain variable domain comprising SEQ ID NO: 237, SEQ ID NO: 282, SEQ ID NO: 283, SEQ ID NO: 284, SEQ ID NO: 285, SEQ ID NO: 286, SEQ ID NO: 287, SEQ ID NO: 288, SEQ ID NO: 289, SEQ ID NO: 290, SEQ ID NO: 291, SEQ ID NO: 292, SEQ ID NO: 293, SEQ ID NO: 294, SEQ ID NO: 295, SEQ ID NO: 296, SEQ ID NO: 297, SEQ ID NO: 298, SEQ ID NO: 299, SEQ ID NO: 300, SEQ ID NO: 301, SEQ ID NO: 302, SEQ ID NO: 303, SEQ ID NO: 304, SEQ ID NO: 305, SEQ ID NO: 306, or SEQ ID NO: 307.

[0436] In some examples of any of the ABPCs described herein, the first antigen-binding domain includes a heavy chain variable domain comprising SEQ ID NO: 327, and a light chain variable domain comprising SEQ ID NO: 237, SEQ ID NO: 282, SEQ ID NO: 283, SEQ ID NO: 284, SEQ ID NO: 285, SEQ ID NO: 286, SEQ ID NO: 287, SEQ ID NO: 288, SEQ ID NO: 289, SEQ ID NO: 290, SEQ ID NO: 291, SEQ ID NO: 292, SEQ ID NO: 293, SEQ ID NO: 294, SEQ ID NO: 295, SEQ ID NO: 296, SEQ ID NO: 297, SEQ ID NO: 298, SEQ ID NO: 299, SEQ ID NO: 300, SEQ ID NO: 301, SEQ ID NO: 302, SEQ ID NO: 303, SEQ ID NO: 304, SEQ ID NO: 305, SEQ ID NO: 306, or SEQ ID NO: 307.

[0437] In some examples of any of the ABPCs described herein, the first antigen-binding domain includes a heavy chain variable domain comprising SEQ ID NO: 328, and a light chain variable domain comprising SEQ ID NO: 237, SEQ ID NO: 282, SEQ ID NO: 283, SEQ ID NO: 284, SEQ ID NO: 285, SEQ ID NO: 286, SEQ ID NO: 287, SEQ ID NO: 288, SEQ ID NO: 289, SEQ ID NO: 290, SEQ ID NO: 291, SEQ ID NO: 292, SEQ ID NO: 293, SEQ ID NO: 294, SEQ ID NO: 295, SEQ ID NO: 296, SEQ ID NO: 297, SEQ ID NO: 298, SEQ ID NO: 299, SEQ ID NO: 300, SEQ ID NO: 301, SEQ ID NO: 302, SEQ ID NO: 303, SEQ ID NO: 304, SEQ ID NO: 305, SEQ ID NO: 306, or SEQ ID NO: 307.

[0438] In some examples of any of the ABPCs described herein, the first antigen-binding domain includes a heavy chain variable domain comprising SEQ ID NO: 329, and a light chain variable domain comprising SEQ ID NO: 237, SEQ ID NO: 282, SEQ ID NO: 283, SEQ ID NO: 284, SEQ ID NO: 285, SEQ ID NO: 286, SEQ ID NO: 287, SEQ ID NO: 288, SEQ ID NO: 289, SEQ ID NO: 290, SEQ ID NO: 291, SEQ ID NO: 292, SEQ ID NO: 293, SEQ ID NO: 294, SEQ ID NO: 295, SEQ ID NO: 296, SEQ ID NO: 297, SEQ ID NO: 298, SEQ ID NO: 299, SEQ ID NO: 300, SEQ ID NO: 301, SEQ ID NO: 302, SEQ ID NO: 303, SEQ ID NO: 304, SEQ ID NO: 305, SEQ ID NO: 306, or SEQ ID NO: 307.

[0439] In some examples of any of the ABPCs described herein, the first antigen-binding domain includes a heavy chain variable domain comprising SEQ ID NO: 330, and a light chain variable domain comprising SEQ ID NO: 237, SEQ ID NO: 282, SEQ ID NO: 283, SEQ ID NO: 284, SEQ ID NO: 285, SEQ ID NO: 286, SEQ ID NO: 287, SEQ ID NO: 288, SEQ ID NO: 289, SEQ ID NO: 290, SEQ ID NO: 291, SEQ ID NO: 292, SEQ ID NO: 293, SEQ ID NO: 294, SEQ ID NO: 295, SEQ ID NO: 296, SEQ ID NO: 297, SEQ ID NO: 298, SEQ ID NO: 299, SEQ ID NO: 300, SEQ ID NO: 301, SEQ ID NO: 302, SEQ ID NO: 303, SEQ ID NO: 304, SEQ ID NO: 305, SEQ ID NO: 306, or SEQ ID NO: 307.

[0440] In some examples of any of the ABPCs described herein, the first antigen-binding domain includes a heavy chain variable domain comprising SEQ ID NO: 331, and a light chain variable domain comprising SEQ ID NO: 237, SEQ ID NO: 282, SEQ ID NO: 283, SEQ ID NO: 284, SEQ ID NO: 285, SEQ ID NO: 286, SEQ ID NO: 287, SEQ ID NO: 288, SEQ ID NO: 289, SEQ ID NO: 290, SEQ ID NO: 291, SEQ ID NO: 292, SEQ ID NO: 293, SEQ ID NO: 294, SEQ ID NO: 295, SEQ ID NO: 296, SEQ ID NO: 297, SEQ ID NO: 298, SEQ ID NO: 299, SEQ ID NO: 300, SEQ ID NO: 301, SEQ ID NO: 302, SEQ ID NO: 303, SEQ ID NO: 304, SEQ ID NO: 305, SEQ ID NO: 306, or SEQ ID NO: 307.

[0441] In some examples of any of the ABPCs described herein, the first antigen-binding domain includes a heavy chain variable domain comprising SEQ ID NO: 332, and a light chain variable domain comprising SEQ ID NO: 237, SEQ ID NO: 282, SEQ ID NO: 283, SEQ ID NO: 284, SEQ ID NO: 285, SEQ ID NO: 286, SEQ ID NO: 287, SEQ ID NO: 288, SEQ ID NO: 289, SEQ ID NO: 290, SEQ ID NO: 291, SEQ ID NO: 292, SEQ ID NO: 293, SEQ ID NO: 294, SEQ ID NO: 295, SEQ ID NO: 296, SEQ ID NO: 297, SEQ ID NO: 298, SEQ ID NO: 299, SEQ ID NO: 300, SEQ ID NO: 301, SEQ ID NO: 302, SEQ ID NO: 303, SEQ ID NO: 304, SEQ ID NO: 305, SEQ ID NO: 306, or SEQ ID NO: 307.

[0442] In some examples of any of the ABPCs described herein, the first antigen-binding domain includes a heavy chain variable domain comprising SEQ ID NO: 333, and a light chain variable domain comprising SEQ ID NO: 237, SEQ ID NO: 282, SEQ ID NO: 283, SEQ ID NO: 284, SEQ ID NO: 285, SEQ ID NO: 286, SEQ ID NO: 287, SEQ ID NO: 288, SEQ ID NO: 289, SEQ ID NO: 290, SEQ ID NO: 291, SEQ ID NO: 292, SEQ ID NO: 293, SEQ ID NO: 294, SEQ ID NO: 295, SEQ ID NO: 296, SEQ ID NO: 297, SEQ ID NO: 298, SEQ ID NO: 299, SEQ ID NO: 300, SEQ ID NO: 301, SEQ ID NO: 302, SEQ ID NO: 303, SEQ ID NO: 304, SEQ ID NO: 305, SEQ ID NO: 306, or SEQ ID NO: 307.

[0443] In some examples of any of ABPCs described herein, the first antigen-binding domain includes a light chain variable domain comprising SEQ ID NO: 334.

[0444] In some examples of any of the ABPCs described herein the first antigen-binding domain includes a light chain variable domain comprising SEQ ID NO: 334, and a heavy chain variable domain comprising SEQ ID NO: 236, SEQ ID NO: 238, SEQ ID NO: 239, SEQ ID NO: 240, SEQ ID NO: 241, SEQ ID NO: 242, SEQ ID NO: 243, SEQ ID NO: 244, SEQ ID NO: 245, SEQ ID NO: 246, SEQ ID NO: 247, SEQ ID NO: 248, SEQ ID NO: 249, SEQ ID NO: 250, SEQ ID NO: 251, SEQ ID NO: 252, SEQ ID NO: 253, SEQ ID NO: 254, SEQ ID NO: 255, SEQ ID NO: 256, SEQ ID NO: 257, SEQ ID NO: 258, SEQ ID NO: 259, SEQ ID NO: 260, SEQ ID NO: 261, SEQ ID NO: 262, SEQ ID NO: 263, SEQ ID NO: 264, SEQ ID NO: 265, SEQ ID NO: 266, SEQ ID NO: 267, SEQ ID NO: 268, SEQ ID NO: 269, SEQ ID NO: 270, SEQ ID NO: 271, SEQ ID NO: 272, SEQ ID NO: 273, SEQ ID NO: 274, SEQ ID NO: 275, SEQ ID NO: 276, SEQ ID NO: 277, SEQ ID NO: 278, SEQ ID NO: 279, SEQ ID NO: 280, or SEQ ID NO: 281.

[0445] In some examples of any of the ABPCs described herein the first antigen-binding domain includes a light chain variable domain comprising SEQ ID NO: 334, and a heavy chain variable domain comprising SEQ ID NO: 239, SEQ ID NO: 241, SEQ ID NO: 243, SEQ ID NO: 249, SEQ ID NO: 250, SEQ ID NO: 252, SEQ ID NO: 253, SEQ ID NO: 254, SEQ ID NO: 256, SEQ ID NO: 258, SEQ ID NO: 266, SEQ ID NO: 270, SEQ ID NO: 274.

[0446] In some examples of any of the ABPCs described herein the first antigen-binding domain includes a light chain variable domain comprising SEQ ID NO: 291 or SEQ ID NO: 292. In some examples of any of the ABPCs described herein the first antigen-binding domain includes a heavy chain variable domain comprising SEQ ID NO: 239, SEQ ID NO: 241, SEQ ID NO: 243, SEQ ID NO: 249, SEQ ID NO: 250, SEQ ID NO: 252, SEQ ID NO: 253, SEQ ID NO: 254, SEQ ID NO: 256, SEQ ID NO: 258, SEQ ID NO: 266, SEQ ID NO: 270, SEQ ID NO: 274.

[0447] In some examples of any of ABPCs described herein the first antigen-binding domain includes a light chain variable domain comprising SEQ ID NO: 291 or SEQ ID NO: 292, and a heavy chain variable domain comprising SEQ ID NO: 239, SEQ ID NO: 241, SEQ ID NO: 243, SEQ ID NO: 249, SEQ ID NO: 250, SEQ ID NO: 252, SEQ ID NO: 253, SEQ ID NO: 254, SEQ ID NO: 256, SEQ ID NO: 258, SEQ ID NO: 266, SEQ ID NO: 270, SEQ ID NO: 274.

[0448] In some examples of any of ABPCs described herein the first antigen-binding domain includes a light chain variable domain comprising SEQ ID NO: 291, and a heavy chain variable domain comprising SEQ ID NO: 239, SEQ ID NO: 241, SEQ ID NO: 243, SEQ ID NO: 249, SEQ ID NO: 250, SEQ ID NO: 252, SEQ ID NO: 253, SEQ ID NO: 254, SEQ ID NO: 256, SEQ ID NO: 258, SEQ ID NO: 266, SEQ ID NO: 270, SEQ ID NO: 274.

[0449] In some examples of any of ABPCs described herein the first antigen-binding domain includes a light chain variable domain comprising SEQ ID NO: 292, and a heavy chain variable domain comprising SEQ ID NO: 239, SEQ ID NO: 241, SEQ ID NO: 243, SEQ ID NO: 249, SEQ ID NO: 250, SEQ ID NO: 252, SEQ ID NO: 253, SEQ ID NO: 254, SEQ ID NO: 256, SEQ ID NO: 258, SEQ ID NO: 266, SEQ ID NO: 270, SEQ ID NO: 274.

[0450] In some examples of any of the ABPCs described herein, the first antigen-binding domain includes a heavy chain variable domain of SC16.15 with one or more (e.g., one, two, three, four, five, six, seven, eight, nine, ten, eleven, twelve, thirteen, fourteen, fifteen, sixteen, seventeen, eighteen, nineteen, or twenty) amino acids substituted with a histidine. In some examples of any of the ABPCs described herein, the first antigen-binding domain includes a light chain variable domain of SC16.15 with one or more (e.g., one, two, three, four, five, six, seven, eight, nine, ten, eleven, twelve, thirteen, fourteen, fifteen, sixteen, seventeen, eighteen, nineteen, or twenty) amino acids substituted with a histidine. In some examples of any of the ABPCs described herein, the first antigen-binding domain includes a heavy chain variable domain of SC16.15 with one or more (e.g., one, two, three, four, five, six, seven, eight, nine, ten, eleven, twelve, thirteen, fourteen, fifteen, sixteen, seventeen, eighteen, nineteen, or twenty) amino acids substituted with a histidine; and a light chain variable domain of SC16.15 with one or more (e.g., one, two, three, four, five, six, seven, eight, nine, ten, eleven, twelve, thirteen, fourteen, fifteen, sixteen, seventeen, eighteen, nineteen, or twenty) amino acids substituted with a histidine. In some examples of any of the ABPCs described herein, the heavy chain variable domain of SC16.15 comprises SEQ ID NO: 335. In some examples of any of the ABPCs described herein, the light chain variable domain of SC16.15 comprises SEQ ID NO: 336.

[0451] In some examples of any of the ABPCs described herein, the first antigen-binding domain comprises a heavy chain variable domain comprising a CDR1, a CDR2, and a CDR3 of SEQ ID NO: 634, SEQ ID NO: 635, and SEQ ID NO: 636, respectively, with collectively a total of one or more (e.g., one, two, three, four, five, six, seven, eight, nine, or ten) amino acid positions in SEQ ID NOs: 634-636 substituted with a histidine. In some examples of any of the ABPCs described herein, the first antigen-binding domain comprises a light chain variable domain comprising a CDR1, a CDR2, and a CDR3 of SEQ ID NO: 637 SEQ ID NO: 638, and SEQ ID NO: 639, respectively, with collectively a total of one or more (e.g., one, two, three, four, five, six, seven, eight, nine, or ten) amino acid positions in SEQ ID NOs: 637-639 substituted with a histidine. In some examples of any of the ABPCs described herein, the first antigen-binding domain includes: a heavy chain variable domain comprising a CDR1, a CDR2, and a CDR3 of SEQ ID NO: 634, SEQ ID NO: 635, and SEQ ID NO: 636, respectively, with collectively a total of one or more (e.g., one, two, three, four, five, six, seven, eight, nine, or ten) amino acid positions in SEQ ID NOs: 634-636 substituted with a histidine; and a light chain variable domain comprising a CDR1, a CDR2, and a CDR3 of SEQ ID NO: 637, SEQ ID NO: 638, and SEQ ID NO: 639, respectively, with collectively a total of one or more (e.g., one, two, three, four, five, six, seven, eight, nine, or ten) amino acid positions in SEQ ID NOs: 637-639 substituted with a histidine.

[0452] In some examples of any of the ABPCs described herein, the first antigen-binding domain includes a heavy chain variable domain that is at least 90% (e.g., at least 92%, at least 94%, at least 96%, at least 98%, at least 99%, or 100%) identical to SEQ ID NO: 335, where the heavy chain variable domain includes a histidine at one or more (e.g., one, two, three, four, five, six, seven, eight, nine, ten, eleven, twelve, thirteen, fourteen, fifteen, sixteen, seventeen, eighteen, nineteen, or twenty) amino acid positions in SEQ ID NO: 335 selected from the group consisting of: 27, 32, 33, 34, 50, 98, 101, 102, 103, 104, and 105. In some examples of any of the ABPCs described herein, the first antigen-binding domain includes a light chain variable domain that is at least 90% (e.g., at least 92%, at least 94%, at least 96%, at least 98%, at least 99%, or 100%) identical to SEQ ID NO: 336, where the light chain variable domain includes a histidine at one or more (e.g., one, two, three, four, five, six, seven, eight, nine, ten, eleven, twelve, thirteen, fourteen, fifteen, sixteen, seventeen, eighteen, nineteen, or twenty) amino acid positions in SEQ ID NO: 336 selected from the group consisting of: 27, 29, 32, 34, 52, 53, 89, 90, 91, 92, 93, 94, and 96. In some examples of any of the ABPCs described herein the first antigen-binding domain includes: a heavy chain variable domain that is at least 90% (e.g., at least 92%, at least 94%, at least 96%, at least 98%, at least 99%, or 100%) identical to SEQ ID NO: 335, where the heavy chain variable domain includes a histidine at one or more (e.g., one, two, three, four, five, six, seven, eight, nine, ten, eleven, twelve, thirteen, fourteen, fifteen, sixteen, seventeen, eighteen, nineteen, or twenty) amino acid positions in SEQ ID NO: 335 selected from the group consisting of: 27, 32, 33, 34, 50, 98, 101, 102, 103, 104, and 105 and a light chain variable domain that is at least 90% (e.g., at least 92%, at least 94%, at least 96%, at least 98%, at least 99%, or 100%) identical to SEQ ID NO: 336, where the light chain variable domain includes a histidine at one or more (e.g., one, two, three, four, five, six, seven, eight, nine, ten, eleven, twelve, thirteen, fourteen, fifteen, sixteen, seventeen, eighteen, nineteen, or twenty) amino acid positions in SEQ ID NO: 336 selected from the group consisting of: 27, 29, 32, 34, 52, 53, 89, 90, 91, 92, 93, 94, and 96.

[0453] In some examples of any of the ABPCs described herein, a heavy chain variable domain includes a heavy chain variable domain that is at least 90% (e.g., at least 92%, at least 94%, at least 96%, at least 98%, at least 99%, or 100%) identical to SEQ ID NO: 335, where the heavy chain variable domain includes a histidine at any of the specific combinations of one or more amino acid positions in SEQ ID NO: 335 listed in Table 7.

[0454] In some examples of any of the ABPCs described herein, the first antigen-binding domain includes a heavy chain variable domain that is at least 90% (e.g., at least 92%, at least 94%, at least 96%, at least 98%, at least 99%, or 100%) identical to SEQ ID NO: 335, where the heavy chain variable domain includes an alanine at position 35 in SEQ ID NO: 335.

[0455] In some examples of any of the ABPCs described herein the first antigen-binding domain includes: a heavy chain variable domain that is at least 90% (e.g., at least 92%, at least 94%, at least 96%, at least 98%, at least 99%, or 100%) identical to SEQ ID NO: 335, where the heavy chain variable domain includes an alanine at position 35 in SEQ ID NO: 335, and a light chain variable domain that is at least 90% (e.g., at least 92%, at least 94%, at least 96%, at least 98%, at least 99%, or 100%) identical to SEQ ID NO: 336, where the light chain variable domain includes a histidine at one or more (e.g., one, two, three, four, five, six, seven, eight, nine, ten, eleven, twelve, thirteen, fourteen, fifteen, sixteen, seventeen, eighteen, nineteen, or twenty) amino acid positions in SEQ ID NO: 336 selected from the group consisting of: 27, 29, 32, 34, 52, 53, 89, 90, 91, 92, 93, 94, and 96.

[0456] In some examples of any of the ABPCs described herein, the first antigen-binding domain includes a heavy chain variable domain that is at least 90% (e.g., at least 92%, at least 94%, at least 96%, at least 98%, at least 99%, or 100%) identical to SEQ ID NO: 335, where the heavy chain variable domain includes a histidine at one or more (e.g., one, two, three, four, five, six, seven, eight, nine, ten, eleven, twelve, thirteen, fourteen, fifteen, sixteen, seventeen, eighteen, nineteen, or twenty) amino acid positions in SEQ ID NO: 335 selected from the group consisting of: 27, 32, 33, 34, 50, 98, 101, 102, 103, 104, and 105, and where the heavy chain variable domain includes an alanine at position 35 in SEQ ID NO: 335. In some examples of any of the ABPCs described herein the first antigen-binding domain includes: a heavy chain variable domain that is at least 90% (e.g., at least 92%, at least 94%, at least 96%, at least 98%, at least 99%, or 100%) identical to SEQ ID NO: 335, where the heavy chain variable domain includes a histidine at one or more (e.g., one, two, three, four, five, six, seven, eight, nine, ten, eleven, twelve, thirteen, fourteen, fifteen, sixteen, seventeen, eighteen, nineteen, or twenty) amino acid positions in SEQ ID NO: 335 selected from the group consisting of: 27, 32, 33, 34, 50, 98, 101, 102, 103, 104, and 105, and where the heavy chain variable domain includes an alanine at position 35 in SEQ ID NO: 335, and a light chain variable domain that is at least 90% (e.g., at least 92%, at least 94%, at least 96%, at least 98%, at least 99%, or 100%) identical to SEQ ID NO: 336, where the light chain variable domain includes a histidine at one or more (e.g., one, two, three, four, five, six, seven, eight, nine, ten, eleven, twelve, thirteen, fourteen, fifteen, sixteen, seventeen, eighteen, nineteen, or twenty) amino acid positions in SEQ ID NO: 336 selected from the group consisting of: 27, 29, 32, 34, 52, 53, 89, 90, 91, 92, 93, 94, and 96.

[0457] In some examples of any of the ABPCs described herein, a heavy chain variable domain includes a heavy chain variable domain that is at least 90% (e.g., at least 92%, at least 94%, at least 96%, at least 98%, at least 99%, or 100%) identical to SEQ ID NO: 335, where the heavy chain variable domain includes a histidine at any of the specific combinations of one or more amino acid positions in SEQ ID NO: 335 listed in Table 7 and where the heavy chain variable domain includes an alanine at position 35 of SEQ ID NO: 335.

TABLE 7
Exemplary Combinations of Amino Acid Positions in SEQ
ID NO: 335 that can be substituted with histidine

27 + 32, 27 + 33, 27 + 34, 27 + 50, 27 + 98, 27 + 101, 27 + 102, 27 + 103, 27 + 104, 27 + 105,
32 + 33, 32 + 34, 32 + 50, 32 + 98, 32 + 101, 32 + 102, 32 + 103, 32 + 104, 32 + 105, 33 + 34,
33 + 50, 33 + 98, 33 + 101, 33 + 102, 33 + 103, 33 + 104, 33 + 105, 34 + 50, 34 + 98, 34 +
101, 34 + 102, 34 + 103, 34 + 104, 34 + 105, 50 + 98, 50 + 101, 50 + 102, 50 + 103, 50 + 104,
50 + 105, 98 + 101, 98 + 102, 98 + 103, 98 + 104, 98 + 105, 101 + 102, 101 + 103, 101 + 104,
101 + 105, 102 + 103, 102 + 104, 102 + 105, 103 + 104, 103 + 105, 104 + 105, 27 + 32 + 33,
27 + 32 + 34, 27 + 32 + 50, 27 + 32 + 98, 27 + 32 + 101, 27 + 32 + 102, 27 + 32 + 103, 27 +
32 + 104, 27 + 32 + 105, 27 + 33 + 34, 27 + 33 + 50, 27 + 33 + 98, 27 + 33 + 101, 27 + 33 +
102, 27 + 33 + 103, 27 + 33 + 104, 27 + 33 + 105, 27 + 34 + 50, 27 + 34 + 98, 27 + 34 + 101,
27 + 34 + 102, 27 + 34 + 103, 27 + 34 + 104, 27 + 34 + 105, 27 + 50 + 98, 27 + 50 + 101, 27 +
50 + 102, 27 + 50 + 103, 27 + 50 + 104, 27 + 50 + 105, 27 + 98 + 101, 27 + 98 + 102, 27 +
98 + 103, 27 + 98 + 104, 27 + 98 + 105, 27 + 101 + 102, 27 + 101 + 103, 27 + 101 + 104, 27 +
101 + 105, 27 + 102 + 103, 27 + 102 + 104, 27 + 102 + 105, 27 + 103 + 104, 27 + 103 + 105,
27 + 104 + 105, 32 + 33 + 34, 32 + 33 + 50, 32 + 33 + 98, 32 + 33 + 101, 32 + 33 + 102, 32 +
33 + 103, 32 + 33 + 104, 32 + 33 + 105, 32 + 34 + 50, 32 + 34 + 98, 32 + 34 + 101, 32 + 34 +
102, 32 + 34 + 103, 32 + 34 + 104, 32 + 34 + 105, 32 + 50 + 98, 32 + 50 + 101, 32 + 50 + 102,
32 + 50 + 103, 32 + 50 + 104, 32 + 50 + 105, 32 + 98 + 101, 32 + 98 + 102, 32 + 98 + 103, 32 +
98 + 104, 32 + 98 + 105, 32 + 101 + 102, 32 + 101 + 103, 32 + 101 + 104, 32 + 101 + 105,
32 + 102 + 103, 32 + 102 + 104, 32 + 102 + 105, 32 + 103 + 104, 32 + 103 + 105, 32 + 104 +
105, 33 + 34 + 50, 33 + 34 + 98, 33 + 34 + 101, 33 + 34 + 102, 33 + 34 + 103, 33 + 34 + 104,
33 + 34 + 105, 33 + 50 + 98, 33 + 50 + 101, 33 + 50 + 102, 33 + 50 + 103, 33 + 50 + 104, 33 +
50 + 105, 33 + 98 + 101, 33 + 98 + 102, 33 + 98 + 103, 33 + 98 + 104, 33 + 98 + 105, 33 +
101 + 102, 33 + 101 + 103, 33 + 101 + 104, 33 + 101 + 105, 33 + 102 + 103, 33 + 102 + 104,
33 + 102 + 105, 33 + 103 + 104, 33 + 103 + 105, 33 + 104 + 105, 34 + 50 + 98, 34 + 50 + 101,
34 + 50 + 102, 34 + 50 + 103, 34 + 50 + 104, 34 + 50 + 105, 34 + 98 + 101, 34 + 98 + 102, 34 +
98 + 103, 34 + 98 + 104, 34 + 98 + 105, 34 + 101 + 102, 34 + 101 + 103, 34 + 101 + 104, 34 +
101 + 105, 34 + 102 + 103, 34 + 102 + 104, 34 + 102 + 105, 34 + 103 + 104, 34 + 103 +
105, 34 + 104 + 105, 50 + 98 + 101, 50 + 98 + 102, 50 + 98 + 103, 50 + 98 + 104, 50 + 98 +
105, 50 + 101 + 102, 50 + 101 + 103, 50 + 101 + 104, 50 + 101 + 105, 50 + 102 + 103, 50 +
102 + 104, 50 + 102 + 105, 50 + 103 + 104, 50 + 103 + 105, 50 + 104 + 105, 98 + 101 + 102,
98 + 101 + 103, 98 + 101 + 104, 98 + 101 + 105, 98 + 102 + 103, 98 + 102 + 104, 98 + 102 +
105, 98 + 103 + 104, 98 + 103 + 105, 98 + 104 + 105, 101 + 102 + 103, 101 + 102 + 104, 101 +
102 + 105, 101 + 103 + 104, 101 + 103 + 105, 101 + 104 + 105, 102 + 103 + 104, 102 + 103 +
105, 102 + 104 + 105, 103 + 104 + 105,

[0458] In some examples of any of the ABPCs described herein, a light chain variable domain includes a light chain variable domain that is at least 90% (e.g., at least 92%, at least 94%, at least 96%, at least 98%, at least 99%, or 100%) identical to SEQ ID NO: 336, where the light chain variable domain includes a histidine at any of the specific combinations of one or more amino acid positions in SEQ ID NO: 336 listed in Table 8.

TABLE 8
Exemplary Combinations of Amino Acid Positions in SEQ
ID NO: 336 that can be substituted with histidine

27 + 29, 27 + 32, 27 + 34, 27 + 52, 27 + 53, 27 + 89, 27 + 90, 27 + 91, 27 + 92, 27 + 93, 27 +
94, 27 + 96, 29 + 32, 29 + 34, 29 + 52, 29 + 53, 29 + 89, 29 + 90, 29 + 91, 29 + 92, 29 + 93,
29 + 94, 29 + 96, 32 + 34, 32 + 52, 32 + 53, 32 + 89, 32 + 90, 32 + 91, 32 + 92, 32 + 93, 32 +
94, 32 + 96, 34 + 52, 34 + 53, 34 + 89, 34 + 90, 34 + 91, 34 + 92, 34 + 93, 34 + 94, 34 + 96,
52 + 53, 52 + 89, 52 + 90, 52 + 91, 52 + 92, 52 + 93, 52 + 94, 52 + 96, 53 + 89, 53 + 90, 53 +
91, 53 + 92, 53 + 93, 53 + 94, 53 + 96, 89 + 90, 89 + 91, 89 + 92, 89 + 93, 89 + 94, 89 + 96,
90 + 91, 90 + 92, 90 + 93, 90 + 94, 90 + 96, 91 + 92, 91 + 93, 91 + 94, 91 + 96, 92 + 93, 92 +
94, 92 + 96, 93 + 94, 93 + 96, 94 + 96, 27 + 29 + 32, 27 + 29 + 34, 27 + 29 + 52, 27 + 29 +
53, 27 + 29 + 89, 27 + 29 + 90, 27 + 29 + 91, 27 + 29 + 92, 27 + 29 + 93, 27 + 29 + 94, 27 +
29 + 96, 27 + 32 + 34, 27 + 32 + 52, 27 + 32 + 53, 27 + 32 + 89, 27 + 32 + 90, 27 + 32 + 91,
27 + 32 + 92, 27 + 32 + 93, 27 + 32 + 94, 27 + 32 + 96, 27 + 34 + 52, 27 + 34 + 53, 27 + 34 +
89, 27 + 34 + 90, 27 + 34 + 91, 27 + 34 + 92, 27 + 34 + 93, 27 + 34 + 94, 27 + 34 + 96, 27 +
52 + 53, 27 + 52 + 89, 27 + 52 + 90, 27 + 52 + 91, 27 + 52 + 92, 27 + 52 + 93, 27 + 52 + 94,
27 + 52 + 96, 27 + 53 + 89, 27 + 53 + 90, 27 + 53 + 91, 27 + 53 + 92, 27 + 53 + 93, 27 + 53 +
94, 27 + 53 + 96, 27 + 89 + 90, 27 + 89 + 91, 27 + 89 + 92, 27 + 89 + 93, 27 + 89 + 94, 27 +
89 + 96, 27 + 90 + 91, 27 + 90 + 92, 27 + 90 + 93, 27 + 90 + 94, 27 + 90 + 96, 27 + 91 + 92,
27 + 91 + 93, 27 + 91 + 94, 27 + 91 + 96, 27 + 92 + 93, 27 + 92 + 94, 27 + 92 + 96, 27 + 93 +
94, 27 + 93 + 96, 27 + 94 + 96, 29 + 32 + 34, 29 + 32 + 52, 29 + 32 + 53, 29 + 32 + 89, 29 +
32 + 90, 29 + 32 + 91, 29 + 32 + 92, 29 + 32 + 93, 29 + 32 + 94, 29 + 32 + 96, 29 + 34 + 52,
29 + 34 + 53, 29 + 34 + 89, 29 + 34 + 90, 29 + 34 + 91, 29 + 34 + 92, 29 + 34 + 93, 29 + 34 +
94, 29 + 34 + 96, 29 + 52 + 53, 29 + 52 + 89, 29 + 52 + 90, 29 + 52 + 91, 29 + 52 + 92, 29 +
52 + 93, 29 + 52 + 94, 29 + 52 + 96, 29 + 53 + 89, 29 + 53 + 90, 29 + 53 + 91, 29 + 53 + 92,
29 + 53 + 93, 29 + 53 + 94, 29 + 53 + 96, 29 + 89 + 90, 29 + 89 + 91, 29 + 89 + 92, 29 + 89 +
93, 29 + 89 + 94, 29 + 89 + 96, 29 + 90 + 91, 29 + 90 + 92, 29 + 90 + 93, 29 + 90 + 94, 29 +
90 + 96, 29 + 91 + 92, 29 + 91 + 93, 29 + 91 + 94, 29 + 91 + 96, 29 + 92 + 93, 29 + 92 + 94,
29 + 92 + 96, 29 + 93 + 94, 29 + 93 + 96, 29 + 94 + 96, 32 + 34 + 52, 32 + 34 + 53, 32 + 34 +
89, 32 + 34 + 90, 32 + 34 + 91, 32 + 34 + 92, 32 + 34 + 93, 32 + 34 + 94, 32 + 34 + 96, 32 +
52 + 53, 32 + 52 + 89, 32 + 52 + 90, 32 + 52 + 91, 32 + 52 + 92, 32 + 52 + 93, 32 + 52 + 94,
32 + 52 + 96, 32 + 53 + 89, 32 + 53 + 90, 32 + 53 + 91, 32 + 53 + 92, 32 + 53 + 93, 32 + 53 +
94, 32 + 53 + 96, 32 + 89 + 90, 32 + 89 + 91, 32 + 89 + 92, 32 + 89 + 93, 32 + 89 + 94, 32 +
89 + 96, 32 + 90 + 91, 32 + 90 + 92, 32 + 90 + 93, 32 + 90 + 94, 32 + 90 + 96, 32 + 91 + 92,
32 + 91 + 93, 32 + 91 + 94, 32 + 91 + 96, 32 + 92 + 93, 32 + 92 + 94, 32 + 92 + 96, 32 + 93 +
94, 32 + 93 + 96, 32 + 94 + 96, 34 + 52 + 53, 34 + 52 + 89, 34 + 52 + 90, 34 + 52 + 91, 34 +
52 + 92, 34 + 52 + 93, 34 + 52 + 94, 34 + 52 + 96, 34 + 53 + 89, 34 + 53 + 90, 34 + 53 + 91,
34 + 53 + 92, 34 + 53 + 93, 34 + 53 + 94, 34 + 53 + 96, 34 + 89 + 90, 34 + 89 + 91, 34 + 89 +
92, 34 + 89 + 93, 34 + 89 + 94, 34 + 89 + 96, 34 + 90 + 91, 34 + 90 + 92, 34 + 90 + 93, 34 +
90 + 94, 34 + 90 + 96, 34 + 91 + 92, 34 + 91 + 93, 34 + 91 + 94, 34 + 91 + 96, 34 + 92 + 93,
34 + 92 + 94, 34 + 92 + 96, 34 + 93 + 94, 34 + 93 + 96, 34 + 94 + 96, 52 + 53 + 89, 52 + 53 +
90, 52 + 53 + 91, 52 + 53 + 92, 52 + 53 + 93, 52 + 53 + 94, 52 + 53 + 96, 52 + 89 + 90, 52 +
89 + 91, 52 + 89 + 92, 52 + 89 + 93, 52 + 89 + 94, 52 + 89 + 96, 52 + 90 + 91, 52 + 90 + 92,
52 + 90 + 93, 52 + 90 + 94, 52 + 90 + 96, 52 + 91 + 92, 52 + 91 + 93, 52 + 91 + 94, 52 + 91 +
96, 52 + 92 + 93, 52 + 92 + 94, 52 + 92 + 96, 52 + 93 + 94, 52 + 93 + 96, 52 + 94 + 96, 53 +
89 + 90, 53 + 89 + 91, 53 + 89 + 92, 53 + 89 + 93, 53 + 89 + 94, 53 + 89 + 96, 53 + 90 + 91,
53 + 90 + 92, 53 + 90 + 93, 53 + 90 + 94, 53 + 90 + 96, 53 + 91 + 92, 53 + 91 + 93, 53 + 91 +
94, 53 + 91 + 96, 53 + 92 + 93, 53 + 92 + 94, 53 + 92 + 96, 53 + 93 + 94, 53 + 93 + 96, 53 +
94 + 96, 89 + 90 + 91, 89 + 90 + 92, 89 + 90 + 93, 89 + 90 + 94, 89 + 90 + 96, 89 + 91 + 92,
89 + 91 + 93, 89 + 91 + 94, 89 + 91 + 96, 89 + 92 + 93, 89 + 92 + 94, 89 + 92 + 96, 89 + 93 +
94, 89 + 93 + 96, 89 + 94 + 96, 90 + 91 + 92, 90 + 91 + 93, 90 + 91 + 94, 90 + 91 + 96, 90 +
92 + 93, 90 + 92 + 94, 90 + 92 + 96, 90 + 93 + 94, 90 + 93 + 96, 90 + 94 + 96, 91 + 92 + 93,
91 + 92 + 94, 91 + 92 + 96, 91 + 93 + 94, 91 + 93 + 96, 91 + 94 + 96, 92 + 93 + 94, 92 + 93 +
96, 92 + 94 + 96, 93 + 94 + 96,

[0459] In some examples of any of the ABPCs described herein, the first antigen-binding domain includes a heavy chain variable domain that is at least 90% (e.g., at least 92%, at least 94%, at least 96%, at least 98%, at least 99%, or 100%) identical to SEQ ID NO: 335, where the heavy chain variable domain includes a histidine at any of the specific combinations of one or more amino acid positions in SEQ ID NO: 335 listed in Table 7; and a light chain variable domain that that is at least 90% (e.g., at least 92%, at least 94% at least 96%, at least 98%, at least 99%, or 100%) identical to SEQ ID NO: 336, where the light chain variable domain includes a histidine at any of the specific combinations of one or more amino acid positions in SEQ ID NO: 336 listed in Table 8.

[0460] In some examples of any of the ABPCs described herein, the first antigen-binding domain includes a heavy chain variable domain that is at least 90% (e.g., at least 92%, at least 94%, at least 96%, at least 98%, at least 99%, or 100%) identical to SEQ ID NO: 335, where the heavy chain variable domain includes a histidine at any of the specific combinations of one or more amino acid positions in SEQ ID NO: 335 listed in Table 7, and where the heavy chain variable domain includes an alanine at position 35 in SEQ ID NO: 335; and a light chain variable domain that that is at least 90% (e.g., at least 92%, at least 94%, at least 96%, at least 98%, at least 99%, or 100%) identical to SEQ ID NO: 336, where the light chain variable domain includes a histidine at any of the specific combinations of one or more amino acid positions in SEQ ID NO: 336 listed in Table 2.

[0461] In some examples of any of the ABPCs described herein, the first antigen-binding domain comprises a light chain variable domain that is at least 90% identical to SEQ ID NO: 336, wherein the light chain variable domain includes a histidine at position 27 in SEQ ID NO: 336; and a heavy chain variable domain that is at least 90% (e.g., at least 92%, at least 94%, at least 96%, at least 98%, at least 99%, or 100%) identical to SEQ ID NO: 335, where the heavy chain variable domain includes a histidine at any of the specific combinations of one or more amino acid positions in SEQ ID NO: 335 listed in Table 7.

[0462] In some examples of any of the ABPCs described herein, the first antigen-binding domain comprises a light chain variable domain comprising SEQ ID NO: 336, and a heavy chain variable domain that is at least 90% identical (e.g., at least 92%, at least 94%, at least 96%, at least 98%, at least 99%, or 100%) identical to SEQ ID NO: 335, where the heavy chain variable domain includes a histidine at any of the specific combinations of one or more (e.g., two, three, four, five, six, seven, eight, nine, or ten) amino acid positions in SEQ ID NO: 335 listed in Table 7.

[0463] In some examples of any of the ABPCs described herein, the first antigen-binding domain comprises a light chain variable domain that is at least 90% identical to SEQ ID NO: 336, wherein the light chain variable domain includes a histidine at position 29 in SEQ ID NO: 336; and a heavy chain variable domain that is at least 90% (e.g., at least 92%, at least 94%, at least 96%, at least 98%, at least 99%, or 100%) identical to SEQ ID NO: 335, where the heavy chain variable domain includes a histidine at any of the specific combinations of one or more amino acid positions in SEQ ID NO: 335 listed in Table 7.

[0464] In some examples of any of the ABPCs described herein, the first antigen-binding domain comprises a light chain variable domain that is at least 90% identical to SEQ ID NO: 336, wherein the light chain variable domain includes a histidine at position 32 in SEQ ID NO: 336; and a heavy chain variable domain that is at least 90% (e.g., at least 92%, at least 94%, at least 96%, at least 98%, at least 99%, or 100%) identical to SEQ ID NO: 335, where the heavy chain variable domain includes a histidine at any of the specific combinations of one or more amino acid positions in SEQ ID NO: 335 listed in Table 7.

[0465] In some examples of any of the ABPCs described herein, the first antigen-binding domain comprises a light chain variable domain that is at least 90% identical to SEQ ID NO: 336, wherein the light chain variable domain includes a histidine at position 34 in SEQ ID NO: 336; and a heavy chain variable domain that is at least 90% (e.g., at least 92%, at least 94%, at least 96%, at least 98%, at least 99%, or 100%) identical to SEQ ID NO: 335, where the heavy chain variable domain includes a histidine at any of the specific combinations of one or more amino acid positions in SEQ ID NO: 335 listed in Table 7.

[0466] In some examples of any of the ABPCs described herein, the first antigen-binding domain comprises a light chain variable domain that is at least 90% identical to SEQ ID NO: 336, wherein the light chain variable domain includes a histidine at position 52 in SEQ ID NO: 336; and a heavy chain variable domain that is at least 90% (e.g., at least 92%, at least 94%, at least 96%, at least 98%, at least 99%, or 100%) identical to SEQ ID NO: 335, where the heavy chain variable domain includes a histidine at any of the specific combinations of one or more amino acid positions in SEQ ID NO: 335 listed in Table 7.

[0467] In some examples of any of the ABPCs described herein, the first antigen-binding domain comprises a light chain variable domain that is at least 90% identical to SEQ ID NO: 336, wherein the light chain variable domain includes a histidine at position 53 in SEQ ID NO: 336; and a heavy chain variable domain that is at least 90% (e.g., at least 92%, at least 94%, at least 96%, at least 98%, at least 99%, or 100%) identical to SEQ ID NO: 335, where the heavy chain variable domain includes a histidine at any of the specific combinations of one or more amino acid positions in SEQ ID NO: 335 listed in Table 7.

[0468] In some examples of any of the ABPCs described herein, the first antigen-binding domain comprises a light chain variable domain that is at least 90% identical to SEQ ID NO: 336, wherein the light chain variable domain includes a histidine at position 89 in SEQ ID NO: 336; and a heavy chain variable domain that is at least 90% (e.g., at least 92%, at least 94%, at least 96%, at least 98%, at least 99%, or 100%) identical to SEQ ID NO: 335, where the heavy chain variable domain includes a histidine at any of the specific combinations of one or more amino acid positions in SEQ ID NO: 335 listed in Table 7.

[0469] In some examples of any of the ABPCs described herein, the first antigen-binding domain comprises a light chain variable domain that is at least 90% identical to SEQ ID NO: 336, wherein the light chain variable domain includes a histidine at position 90 in SEQ ID NO: 336; and a heavy chain variable domain that is at least 90% (e.g., at least 92%, at least 94%, at least 96%, at least 98%, at least 99%, or 100%) identical to SEQ ID NO: 335, where the heavy chain variable domain includes a histidine at any of the specific combinations of one or more amino acid positions in SEQ ID NO: 335 listed in Table 7.

[0470] In some examples of any of the ABPCs described herein, the first antigen-binding domain comprises a light chain variable domain that is at least 90% identical to SEQ ID NO: 336, wherein the light chain variable domain includes a histidine at position 91 in SEQ ID NO: 336; and a heavy chain variable domain that is at least 90% (e.g., at least 92%, at least 94%, at least 96%, at least 98%, at least 99%, or 100%) identical to SEQ ID NO: 335, where the heavy chain variable domain includes a histidine at any of the specific combinations of one or more amino acid positions in SEQ ID NO: 335 listed in Table 7.

[0471] In some examples of any of the ABPCs described herein, the first antigen-binding domain comprises a light chain variable domain that is at least 90% identical to SEQ ID NO: 336, wherein the light chain variable domain includes a histidine at position 92 in SEQ ID NO: 336; and a heavy chain variable domain that is at least 90% (e.g., at least 92%, at least 94%, at least 96%, at least 98%, at least 99%, or 100%) identical to SEQ ID NO: 335, where the heavy chain variable domain includes a histidine at any of the specific combinations of one or more amino acid positions in SEQ ID NO: 335 listed in Table 7.

[0472] In some examples of any of the ABPCs described herein, the first antigen-binding domain comprises a light chain variable domain that is at least 90% identical to SEQ ID NO: 336, wherein the light chain variable domain includes a histidine at position 93 in SEQ ID NO: 336; and a heavy chain variable domain that is at least 90% (e.g., at least 92%, at least 94%, at least 96%, at least 98%, at least 99%, or 100%) identical to SEQ ID NO: 335, where the heavy chain variable domain includes a histidine at any of the specific combinations of one or more amino acid positions in SEQ ID NO: 335 listed in Table 7.

[0473] In some examples of any of the ABPCs described herein, the first antigen-binding domain comprises a light chain variable domain that is at least 90% identical to SEQ ID NO: 336, wherein the light chain variable domain includes a histidine at position 94 in SEQ ID NO: 336; and a heavy chain variable domain that is at least 90% (e.g., at least 92%, at least 94%, at least 96%, at least 98%, at least 99%, or 100%) identical to SEQ ID NO: 335, where the heavy chain variable domain includes a histidine at any of the specific combinations of one or more amino acid positions in SEQ ID NO: 335 listed in Table 7.

[0474] In some examples of any of the ABPCs described herein, the first antigen-binding domain comprises a light chain variable domain that is at least 90% identical to SEQ ID NO: 336, wherein the light chain variable domain includes a histidine at position 96 in SEQ ID NO: 336; and a heavy chain variable domain that is at least 90% (e.g., at least 92%, at least 94%, at least 96%, at least 98%, at least 99%, or 100%) identical to SEQ ID NO: 335, where the heavy chain variable domain includes a histidine at any of the specific combinations of one or more amino acid positions in SEQ ID NO: 335 listed in Table 7.

[0475] In some examples of any of the ABPCs described herein, the first antigen-binding domain includes a heavy chain variable domain of SC16.15 with one or more (e.g., one, two, three, four, five, six, seven, eight, nine, ten, eleven, twelve, thirteen, fourteen, fifteen, sixteen, seventeen, eighteen, nineteen, or twenty) histidine(s) substituted with an alanine. In some examples of any of the ABPCs described herein, the first antigen-binding domain includes a light chain variable domain of SC16.15 with one or more (e.g., one, two, three, four, five, six, seven, eight, nine, ten, eleven, twelve, thirteen, fourteen, fifteen, sixteen, seventeen, eighteen, nineteen, or twenty) histidine(s) substituted with an alanine. In some examples of any of the ABPCs described herein, the first antigen-binding domain includes a heavy chain variable domain SC16.15 with one or more (e.g., one, two, three, four, five, six, seven, eight, nine, ten, eleven, twelve, thirteen, fourteen, fifteen, sixteen, seventeen, eighteen, nineteen, or twenty) histidines substituted with an alanine; and a light chain variable domain of SC16.15 with one or more (e.g., one, two, three, four, five, six, seven, eight, nine, ten, eleven, twelve, thirteen, fourteen, fifteen, sixteen, seventeen, eighteen, nineteen, or twenty) histidine(s) substituted with an alanine. In some examples of any of the ABPCs described herein, the heavy chain variable domain of SC16.15 comprises SEQ ID NO: 335. In some examples of any of the ABPCs described herein, the light chain variable domain of SC16.15 comprises SEQ ID NO: 336.

[0476] In some examples of any of the ABPCs described herein, the first antigen-binding domain comprises a heavy chain variable domain comprising a CDR1, a CDR2, and a CDR3 of SEQ ID NO: 634, SEQ ID NO: 635, and SEQ ID NO: 636, respectively, with collectively a total of one or more (e.g., one, two, three, four, five, six, seven, eight, nine, or ten) histidine(s) in SEQ ID NOs: 634-636 substituted with an alanine. In some examples of any of the ABPCs described herein, the first antigen-binding domain comprises a light chain variable domain comprising a CDR1, a CDR2, and a CDR3 of SEQ ID NO: 637, SEQ ID NO: 638, and SEQ ID NO: 639, respectively, with collectively a total of one or more (e.g., one, two, three, four, five, six, seven, eight, nine, or ten) histidine(s) in SEQ ID NOs: 637-639 substituted with an alanine. In some examples of any of the ABPCs described herein, the first antigen-binding domain includes: a heavy chain variable domain comprising a CDR1, a CDR2, and a CDR3 of SEQ ID NO: 634, SEQ ID NO: 635, and SEQ ID NO: 636, respectively, with collectively a total of one or more (e.g., one, two, three, four, five, six, seven, eight, nine, or ten) histidine(s) in SEQ ID NOs: 634-636 substituted with an alanine; and a light chain variable domain comprising a CDR1, a CDR2, and a CDR3 of SEQ ID NO: 637, SEQ ID NO: 638, and SEQ ID NO: 639, respectively, with collectively a total of one or more (e.g., one, two, three, four, five, six, seven, eight, nine, or ten) histidine(s) in SEQ ID NOs: 637-639 substituted with an alanine.

[0477] In some examples of any of the ABPCs described herein, the first antigen-binding domain comprises a heavy chain variable domain of SEQ ID NO: 335, SEQ ID NO: 337, SEQ ID NO: 338, SEQ ID NO: 339, SEQ ID NO: SEQ ID NO: 340, SEQ ID NO: 341 SEQ ID NO: 342, SEQ ID NO: 343, SEQ ID NO: 344, SEQ ID NO: 345, SEQ ID NO: 346, SEQ ID NO: 347, SEQ ID NO: 348, SEQ ID NO: 349, SEQ ID NO: 350, SEQ ID NO: 351, SEQ ID NO: 352, SEQ ID NO: 353, SEQ ID NO: 354, SEQ ID NO: 355, SEQ ID NO: 356, SEQ ID NO: 357, SEQ ID NO: 358, SEQ ID NO: 359, SEQ ID NO: 360, SEQ ID NO: 361, SEQ ID NO: 362, SEQ ID NO: 363, SEQ ID NO: 364, SEQ ID NO: 365, SEQ ID NO: 366, SEQ ID NO: 367, SEQ ID NO: 368, SEQ ID NO: 369, SEQ ID NO: 370, SEQ ID NO: 371, SEQ ID NO: 372, SEQ ID NO: 373, SEQ ID NO: 374, SEQ ID NO: 375, or SEQ ID NO: 376.

[0478] In some examples of any of the ABPCs described herein, the first antigen-binding domain includes a light chain variable domain of SEQ ID NO: 336, SEQ ID NO: 377, SEQ ID NO: 378, SEQ ID NO: 379, SEQ ID NO: 380, SEQ ID NO: 381, SEQ ID NO: 382, SEQ ID NO: 383, SEQ ID NO: 384, SEQ ID NO: 385, SEQ ID NO: 386, SEQ ID NO: 387, SEQ ID NO: 388, SEQ ID NO: 389, SEQ ID NO: 390, SEQ ID NO: 391, SEQ ID NO: 392, SEQ ID NO: 393, SEQ ID NO: 394, SEQ ID NO: 395, SEQ ID NO: 396, SEQ ID NO: 397, SEQ ID NO: 398, SEQ ID NO: 399, or SEQ ID NO: 400.

[0479] In some examples of any of the ABPCs described herein, the first antigen-binding domain includes a light chain variable domain comprising SEQ ID NO: 336, and a heavy chain variable domain comprising SEQ ID NO: 335, SEQ ID NO: 337, SEQ ID NO: 338, SEQ ID NO: 339, SEQ ID NO: SEQ ID NO: 340, SEQ ID NO: 341 SEQ ID NO: 342, SEQ ID NO: 343, SEQ ID NO: 344, SEQ ID NO: 345, SEQ ID NO: 346, SEQ ID NO: 347, SEQ ID NO: 348, SEQ ID NO: 349, SEQ ID NO: 350, SEQ ID NO: 351, SEQ ID NO: 352, SEQ ID NO: 353, SEQ ID NO: 354, SEQ ID NO: 355, SEQ ID NO: 356, SEQ ID NO: 357, SEQ ID NO: 358, SEQ ID NO: 359, SEQ ID NO: 360, SEQ ID NO: 361, SEQ ID NO: 362, SEQ ID NO: 363, SEQ ID NO: 364, SEQ ID NO: 365, SEQ ID NO: 366, SEQ ID NO: 367, SEQ ID NO: 368, SEQ ID NO: 369, SEQ ID NO: 370, SEQ ID NO: 371, SEQ ID NO: 372, SEQ ID NO: 373, SEQ ID NO: 374, SEQ ID NO: 375, or SEQ ID NO: 376.

[0480] In some examples of any of the ABPCs described herein, the first antigen-binding domain includes a light chain variable domain comprising SEQ ID NO: 377, and a heavy chain variable domain comprising SEQ ID NO: 335, SEQ ID NO: 337, SEQ ID NO: 338, SEQ ID NO: 339, SEQ ID NO: SEQ ID NO: 340, SEQ ID NO: 341 SEQ ID NO: 342, SEQ ID NO: 343, SEQ ID NO: 344, SEQ ID NO: 345, SEQ ID NO: 346, SEQ ID NO: 347, SEQ ID NO: 348, SEQ ID NO: 349, SEQ ID NO: 350, SEQ ID NO: 351, SEQ ID NO: 352, SEQ ID NO: 353, SEQ ID NO: 354, SEQ ID NO: 355, SEQ ID NO: 356, SEQ ID NO: 357, SEQ ID NO: 358, SEQ ID NO: 359, SEQ ID NO: 360, SEQ ID NO: 361, SEQ ID NO: 362, SEQ ID NO: 363, SEQ ID NO: 364, SEQ ID NO: 365, SEQ ID NO: 366, SEQ ID NO: 367, SEQ ID NO: 368, SEQ ID NO: 369, SEQ ID NO: 370, SEQ ID NO: 371, SEQ ID NO: 372, SEQ ID NO: 373, SEQ ID NO: 374, SEQ ID NO: 375, or SEQ ID NO: 376.

[0481] In some examples of any of the ABPCs described herein, the first antigen-binding domain includes a light chain variable domain comprising SEQ ID NO: 378, and a heavy chain variable domain comprising SEQ ID NO: 335, SEQ ID NO: 337, SEQ ID NO: 338, SEQ ID NO: 339, SEQ ID NO: SEQ ID NO: 340, SEQ ID NO: 341 SEQ ID NO: 342, SEQ ID NO: 343, SEQ ID NO: 344, SEQ ID NO: 345, SEQ ID NO: 346, SEQ ID NO: 347, SEQ ID NO: 348, SEQ ID NO: 349, SEQ ID NO: 350, SEQ ID NO: 351, SEQ ID NO: 352, SEQ ID NO: 353, SEQ ID NO: 354, SEQ ID NO: 355, SEQ ID NO: 356, SEQ ID NO: 357, SEQ ID NO: 358, SEQ ID NO: 359, SEQ ID NO: 360, SEQ ID NO: 361, SEQ ID NO: 362, SEQ ID NO: 363, SEQ ID NO: 364, SEQ ID NO: 365, SEQ ID NO: 366, SEQ ID NO: 367, SEQ ID NO: 368, SEQ ID NO: 369, SEQ ID NO: 370, SEQ ID NO: 371, SEQ ID NO: 372, SEQ ID NO: 373, SEQ ID NO: 374, SEQ ID NO: 375, or SEQ ID NO: 376.

[0482] In some examples of any of the ABPCs described herein, the first antigen-binding domain includes a light chain variable domain comprising SEQ ID NO: 379, and a heavy chain variable domain comprising SEQ ID NO: 335, SEQ ID NO: 337, SEQ ID NO: 338, SEQ ID NO: 339, SEQ ID NO: SEQ ID NO: 340, SEQ ID NO: 341 SEQ ID NO: 342, SEQ ID NO: 343, SEQ ID NO: 344, SEQ ID NO: 345, SEQ ID NO: 346, SEQ ID NO: 347, SEQ ID NO: 348, SEQ ID NO: 349, SEQ ID NO: 350, SEQ ID NO: 351, SEQ ID NO: 352, SEQ ID NO: 353, SEQ ID NO: 354, SEQ ID NO: 355, SEQ ID NO: 356, SEQ ID NO: 357, SEQ ID NO: 358, SEQ ID NO: 359, SEQ ID NO: 360, SEQ ID NO: 361, SEQ ID NO: 362, SEQ ID NO: 363, SEQ ID NO: 364, SEQ ID NO: 365, SEQ ID NO: 366, SEQ ID NO: 367, SEQ ID NO: 368, SEQ ID NO: 369, SEQ ID NO: 370, SEQ ID NO: 371, SEQ ID NO: 372, SEQ ID NO: 373, SEQ ID NO: 374, SEQ ID NO: 375, or SEQ ID NO: 376.

[0483] In some examples of any of the ABPCs described herein, the first antigen-binding domain includes a light chain variable domain comprising SEQ ID NO: 380, and a heavy chain variable domain comprising SEQ ID NO: 335, SEQ ID NO: 337, SEQ ID NO: 338, SEQ ID NO: 339, SEQ ID NO: SEQ ID NO: 340, SEQ ID NO: 341 SEQ ID NO: 342, SEQ ID NO: 343, SEQ ID NO: 344, SEQ ID NO: 345, SEQ ID NO: 346, SEQ ID NO: 347, SEQ ID NO: 348, SEQ ID NO: 349, SEQ ID NO: 350, SEQ ID NO: 351, SEQ ID NO: 352, SEQ ID NO: 353, SEQ ID NO: 354, SEQ ID NO: 355, SEQ ID NO: 356, SEQ ID NO: 357, SEQ ID NO: 358, SEQ ID NO: 359, SEQ ID NO: 360, SEQ ID NO: 361, SEQ ID NO: 362, SEQ ID NO: 363, SEQ ID NO: 364, SEQ ID NO: 365, SEQ ID NO: 366, SEQ ID NO: 367, SEQ ID NO: 368, SEQ ID NO: 369, SEQ ID NO: 370, SEQ ID NO: 371, SEQ ID NO: 372, SEQ ID NO: 373, SEQ ID NO: 374, SEQ ID NO: 375, or SEQ ID NO: 376.

[0484] In some examples of any of the ABPCs described herein, the first antigen-binding domain includes a light chain variable domain comprising SEQ ID NO: 381, and a heavy chain variable domain comprising SEQ ID NO: 335, SEQ ID NO: 337, SEQ ID NO: 338, SEQ ID NO: 339, SEQ ID NO: SEQ ID NO: 340, SEQ ID NO: 341 SEQ ID NO: 342, SEQ ID NO: 343, SEQ ID NO: 344, SEQ ID NO: 345, SEQ ID NO: 346, SEQ ID NO: 347, SEQ ID NO: 348, SEQ ID NO: 349, SEQ ID NO: 350, SEQ ID NO: 351, SEQ ID NO: 352, SEQ ID NO: 353, SEQ ID NO: 354, SEQ ID NO: 355, SEQ ID NO: 356, SEQ ID NO: 357, SEQ ID NO: 358, SEQ ID NO: 359, SEQ ID NO: 360, SEQ ID NO: 361, SEQ ID NO: 362, SEQ ID NO: 363, SEQ ID NO: 364, SEQ ID NO: 365, SEQ ID NO: 366, SEQ ID NO: 367, SEQ ID NO: 368, SEQ ID NO: 369, SEQ ID NO: 370, SEQ ID NO: 371, SEQ ID NO: 372, SEQ ID NO: 373, SEQ ID NO: 374, SEQ ID NO: 375, or SEQ ID NO: 376.

[0485] In some examples of any of the ABPCs described herein, the first antigen-binding domain includes a light chain variable domain comprising SEQ ID NO: 382, and a heavy chain variable domain comprising SEQ ID NO: 335, SEQ ID NO: 337, SEQ ID NO: 338, SEQ ID NO: 339, SEQ ID NO: SEQ ID NO: 340, SEQ ID NO: 341 SEQ ID NO: 342, SEQ ID NO: 343, SEQ ID NO: 344, SEQ ID NO: 345, SEQ ID NO: 346, SEQ ID NO: 347, SEQ ID NO: 348, SEQ ID NO: 349, SEQ ID NO: 350, SEQ ID NO: 351, SEQ ID NO: 352, SEQ ID NO: 353, SEQ ID NO: 354, SEQ ID NO: 355, SEQ ID NO: 356, SEQ ID NO: 357, SEQ ID NO: 358, SEQ ID NO: 359, SEQ ID NO: 360, SEQ ID NO: 361, SEQ ID NO: 362, SEQ ID NO: 363, SEQ ID NO: 364, SEQ ID NO: 365, SEQ ID NO: 366, SEQ ID NO: 367, SEQ ID NO: 368, SEQ ID NO: 369, SEQ ID NO: 370, SEQ ID NO: 371, SEQ ID NO: 372, SEQ ID NO: 373, SEQ ID NO: 374, SEQ ID NO: 375, or SEQ ID NO: 376.

[0486] In some examples of any of the ABPCs described herein, the first antigen-binding domain includes a light chain variable domain comprising SEQ ID NO: 383, and a heavy chain variable domain comprising SEQ ID NO: 335, SEQ ID NO: 337, SEQ ID NO: 338, SEQ ID NO: 339, SEQ ID NO: SEQ ID NO: 340, SEQ ID NO: 341 SEQ ID NO: 342, SEQ ID NO: 343, SEQ ID NO: 344, SEQ ID NO: 345, SEQ ID NO: 346, SEQ ID NO: 347, SEQ ID NO: 348, SEQ ID NO: 349, SEQ ID NO: 350, SEQ ID NO: 351, SEQ ID NO: 352, SEQ ID NO: 353, SEQ ID NO: 354, SEQ ID NO: 355, SEQ ID NO: 356, SEQ ID NO: 357, SEQ ID NO: 358, SEQ ID NO: 359, SEQ ID NO: 360, SEQ ID NO: 361, SEQ ID NO: 362, SEQ ID NO: 363, SEQ ID NO: 364, SEQ ID NO: 365, SEQ ID NO: 366, SEQ ID NO: 367, SEQ ID NO: 368, SEQ ID NO: 369, SEQ ID NO: 370, SEQ ID NO: 371, SEQ ID NO: 372, SEQ ID NO: 373, SEQ ID NO: 374, SEQ ID NO: 375, or SEQ ID NO: 376.

[0487] In some examples of any of the ABPCs described herein, the first antigen-binding domain includes a light chain variable domain comprising SEQ ID NO: 384, and a heavy chain variable domain comprising SEQ ID NO: 335, SEQ ID NO: 337, SEQ ID NO: 338, SEQ ID NO: 339, SEQ ID NO: SEQ ID NO: 340, SEQ ID NO: 341 SEQ ID NO: 342, SEQ ID NO: 343, SEQ ID NO: 344, SEQ ID NO: 345, SEQ ID NO: 346, SEQ ID NO: 347, SEQ ID NO: 348, SEQ ID NO: 349, SEQ ID NO: 350, SEQ ID NO: 351, SEQ ID NO: 352, SEQ ID NO: 353, SEQ ID NO: 354, SEQ ID NO: 355, SEQ ID NO: 356, SEQ ID NO: 357, SEQ ID NO: 358, SEQ ID NO: 359, SEQ ID NO: 360, SEQ ID NO: 361, SEQ ID NO: 362, SEQ ID NO: 363, SEQ ID NO: 364, SEQ ID NO: 365, SEQ ID NO: 366, SEQ ID NO: 367, SEQ ID NO: 368, SEQ ID NO: 369, SEQ ID NO: 370, SEQ ID NO: 371, SEQ ID NO: 372, SEQ ID NO: 373, SEQ ID NO: 374, SEQ ID NO: 375, or SEQ ID NO: 376.

[0488] In some examples of any of the ABPCs described herein, the first antigen-binding domain includes a light chain variable domain comprising SEQ ID NO: 385, and a heavy chain variable domain comprising SEQ ID NO: 335, SEQ ID NO: 337, SEQ ID NO: 338, SEQ ID NO: 339, SEQ ID NO: SEQ ID NO: 340, SEQ ID NO: 341 SEQ ID NO: 342, SEQ ID NO: 343, SEQ ID NO: 344, SEQ ID NO: 345, SEQ ID NO: 346, SEQ ID NO: 347, SEQ ID NO: 348, SEQ ID NO: 349, SEQ ID NO: 350, SEQ ID NO: 351, SEQ ID NO: 352, SEQ ID NO: 353, SEQ ID NO: 354, SEQ ID NO: 355, SEQ ID NO: 356, SEQ ID NO: 357, SEQ ID NO: 358, SEQ ID NO: 359, SEQ ID NO: 360, SEQ ID NO: 361, SEQ ID NO: 362, SEQ ID NO: 363, SEQ ID NO: 364, SEQ ID NO: 365, SEQ ID NO: 366, SEQ ID NO: 367, SEQ ID NO: 368, SEQ ID NO: 369, SEQ ID NO: 370, SEQ ID NO: 371, SEQ ID NO: 372, SEQ ID NO: 373, SEQ ID NO: 374, SEQ ID NO: 375, or SEQ ID NO: 376.

[0489] In some examples of any of the ABPCs described herein, the first antigen-binding domain includes a light chain variable domain comprising SEQ ID NO: 386, and a heavy chain variable domain comprising SEQ ID NO: 335, SEQ ID NO: 337, SEQ ID NO: 338, SEQ ID NO: 339, SEQ ID NO: SEQ ID NO: 340, SEQ ID NO: 341 SEQ ID NO: 342, SEQ ID NO: 343, SEQ ID NO: 344, SEQ ID NO: 345, SEQ ID NO: 346, SEQ ID NO: 347, SEQ ID NO: 348, SEQ ID NO: 349, SEQ ID NO: 350, SEQ ID NO: 351, SEQ ID NO: 352, SEQ ID NO: 353, SEQ ID NO: 354, SEQ ID NO: 355, SEQ ID NO: 356, SEQ ID NO: 357, SEQ ID NO: 358, SEQ ID NO: 359, SEQ ID NO: 360, SEQ ID NO: 361, SEQ ID NO: 362, SEQ ID NO: 363, SEQ ID NO: 364, SEQ ID NO: 365, SEQ ID NO: 366, SEQ ID NO: 367, SEQ ID NO: 368, SEQ ID NO: 369, SEQ ID NO: 370, SEQ ID NO: 371, SEQ ID NO: 372, SEQ ID NO: 373, SEQ ID NO: 374, SEQ ID NO: 375, or SEQ ID NO: 376.

[0490] In some examples of any of the ABPCs described herein, the first antigen-binding domain includes a light chain variable domain comprising SEQ ID NO: 387, and a heavy chain variable domain comprising SEQ ID NO: 335, SEQ ID NO: 337, SEQ ID NO: 338, SEQ ID NO: 339, SEQ ID NO: SEQ ID NO: 340, SEQ ID NO: 341 SEQ ID NO: 342, SEQ ID NO: 343, SEQ ID NO: 344, SEQ ID NO: 345, SEQ ID NO: 346, SEQ ID NO: 347, SEQ ID NO: 348, SEQ ID NO: 349, SEQ ID NO: 350, SEQ ID NO: 351, SEQ ID NO: 352, SEQ ID NO: 353, SEQ ID NO: 354, SEQ ID NO: 355, SEQ ID NO: 356, SEQ ID NO: 357, SEQ ID NO: 358, SEQ ID NO: 359, SEQ ID NO: 360, SEQ ID NO: 361, SEQ ID NO: 362, SEQ ID NO: 363, SEQ ID NO: 364, SEQ ID NO: 365, SEQ ID NO: 366, SEQ ID NO: 367, SEQ ID NO: 368, SEQ ID NO: 369, SEQ ID NO: 370, SEQ ID NO: 371, SEQ ID NO: 372, SEQ ID NO: 373, SEQ ID NO: 374, SEQ ID NO: 375, or SEQ ID NO: 376.

[0491] In some examples of any of the ABPCs described herein, the first antigen-binding domain includes a light chain variable domain comprising SEQ ID NO: 388, and a heavy chain variable domain comprising SEQ ID NO: 335, SEQ ID NO: 337, SEQ ID NO: 338, SEQ ID NO: 339, SEQ ID NO: SEQ ID NO: 340, SEQ ID NO: 341 SEQ ID NO: 342, SEQ ID NO: 343, SEQ ID NO: 344, SEQ ID NO: 345, SEQ ID NO: 346, SEQ ID NO: 347, SEQ ID NO: 348, SEQ ID NO: 349, SEQ ID NO: 350, SEQ ID NO: 351, SEQ ID NO: 352, SEQ ID NO: 353, SEQ ID NO: 354, SEQ ID NO: 355, SEQ ID NO: 356, SEQ ID NO: 357, SEQ ID NO: 358, SEQ ID NO: 359, SEQ ID NO: 360, SEQ ID NO: 361, SEQ ID NO: 362, SEQ ID NO: 363, SEQ ID NO: 364, SEQ ID NO: 365, SEQ ID NO: 366, SEQ ID NO: 367, SEQ ID NO: 368, SEQ ID NO: 369, SEQ ID NO: 370, SEQ ID NO: 371, SEQ ID NO: 372, SEQ ID NO: 373, SEQ ID NO: 374, SEQ ID NO: 375, or SEQ ID NO: 376.

[0492] In some examples of any of the ABPCs described herein, the first antigen-binding domain includes a light chain variable domain comprising SEQ ID NO: 389, and a heavy chain variable domain comprising SEQ ID NO: 335, SEQ ID NO: 337, SEQ ID NO: 338, SEQ ID NO: 339, SEQ ID NO: SEQ ID NO: 340, SEQ ID NO: 341 SEQ ID NO: 342, SEQ ID NO: 343, SEQ ID NO: 344, SEQ ID NO: 345, SEQ ID NO: 346, SEQ ID NO: 347, SEQ ID NO: 348, SEQ ID NO: 349, SEQ ID NO: 350, SEQ ID NO: 351, SEQ ID NO: 352, SEQ ID NO: 353, SEQ ID NO: 354, SEQ ID NO: 355, SEQ ID NO: 356, SEQ ID NO: 357, SEQ ID NO: 358, SEQ ID NO: 359, SEQ ID NO: 360, SEQ ID NO: 361, SEQ ID NO: 362, SEQ ID NO: 363, SEQ ID NO: 364, SEQ ID NO: 365, SEQ ID NO: 366, SEQ ID NO: 367, SEQ ID NO: 368, SEQ ID NO: 369, SEQ ID NO: 370, SEQ ID NO: 371, SEQ ID NO: 372, SEQ ID NO: 373, SEQ ID NO: 374, SEQ ID NO: 375, or SEQ ID NO: 376.

[0493] In some examples of any of the ABPCs described herein, the first antigen-binding domain includes a light chain variable domain comprising SEQ ID NO: 390, and a heavy chain variable domain comprising SEQ ID NO: 335, SEQ ID NO: 337, SEQ ID NO: 338, SEQ ID NO: 339, SEQ ID NO: SEQ ID NO: 340, SEQ ID NO: 341 SEQ ID NO: 342, SEQ ID NO: 343, SEQ ID NO: 344, SEQ ID NO: 345, SEQ ID NO: 346, SEQ ID NO: 347, SEQ ID NO: 348, SEQ ID NO: 349, SEQ ID NO: 350, SEQ ID NO: 351, SEQ ID NO: 352, SEQ ID NO: 353, SEQ ID NO: 354, SEQ ID NO: 355, SEQ ID NO: 356, SEQ ID NO: 357, SEQ ID NO: 358, SEQ ID NO: 359, SEQ ID NO: 360, SEQ ID NO: 361, SEQ ID NO: 362, SEQ ID NO: 363, SEQ ID NO: 364, SEQ ID NO: 365, SEQ ID NO: 366, SEQ ID NO: 367, SEQ ID NO: 368, SEQ ID NO: 369, SEQ ID NO: 370, SEQ ID NO: 371, SEQ ID NO: 372, SEQ ID NO: 373, SEQ ID NO: 374, SEQ ID NO: 375, or SEQ ID NO: 376.

[0494] In some examples of any of the ABPCs described herein, the first antigen-binding domain includes a light chain variable domain comprising SEQ ID NO: 391, and a heavy chain variable domain comprising SEQ ID NO: 335, SEQ ID NO: 337, SEQ ID NO: 338, SEQ ID NO: 339, SEQ ID NO: SEQ ID NO: 340, SEQ ID NO: 341 SEQ ID NO: 342, SEQ ID NO: 343, SEQ ID NO: 344, SEQ ID NO: 345, SEQ ID NO: 346, SEQ ID NO: 347, SEQ ID NO: 348, SEQ ID NO: 349, SEQ ID NO: 350, SEQ ID NO: 351, SEQ ID NO: 352, SEQ ID NO: 353, SEQ ID NO: 354, SEQ ID NO: 355, SEQ ID NO: 356, SEQ ID NO: 357, SEQ ID NO: 358, SEQ ID NO: 359, SEQ ID NO: 360, SEQ ID NO: 361, SEQ ID NO: 362, SEQ ID NO: 363, SEQ ID NO: 364, SEQ ID NO: 365, SEQ ID NO: 366, SEQ ID NO: 367, SEQ ID NO: 368, SEQ ID NO: 369, SEQ ID NO: 370, SEQ ID NO: 371, SEQ ID NO: 372, SEQ ID NO: 373, SEQ ID NO: 374, SEQ ID NO: 375, or SEQ ID NO: 376.

[0495] In some examples of any of the ABPCs described herein, the first antigen-binding domain includes a light chain variable domain comprising SEQ ID NO: 392, and a heavy chain variable domain comprising SEQ ID NO: 335, SEQ ID NO: 337, SEQ ID NO: 338, SEQ ID NO: 339, SEQ ID NO: SEQ ID NO: 340, SEQ ID NO: 341 SEQ ID NO: 342, SEQ ID NO: 343, SEQ ID NO: 344, SEQ ID NO: 345, SEQ ID NO: 346, SEQ ID NO: 347, SEQ ID NO: 348, SEQ ID NO: 349, SEQ ID NO: 350, SEQ ID NO: 351, SEQ ID NO: 352, SEQ ID NO: 353, SEQ ID NO: 354, SEQ ID NO: 355, SEQ ID NO: 356, SEQ ID NO: 357, SEQ ID NO: 358, SEQ ID NO: 359, SEQ ID NO: 360, SEQ ID NO: 361, SEQ ID NO: 362, SEQ ID NO: 363, SEQ ID NO: 364, SEQ ID NO: 365, SEQ ID NO: 366, SEQ ID NO: 367, SEQ ID NO: 368, SEQ ID NO: 369, SEQ ID NO: 370, SEQ ID NO: 371, SEQ ID NO: 372, SEQ ID NO: 373, SEQ ID NO: 374, SEQ ID NO: 375, or SEQ ID NO: 376.

[0496] In some examples of any of the ABPCs described herein, the first antigen-binding domain includes a light chain variable domain comprising SEQ ID NO: 393, and a heavy chain variable domain comprising SEQ ID NO: 335, SEQ ID NO: 337, SEQ ID NO: 338, SEQ ID NO: 339, SEQ ID NO: SEQ ID NO: 340, SEQ ID NO: 341 SEQ ID NO: 342, SEQ ID NO: 343, SEQ ID NO: 344, SEQ ID NO: 345, SEQ ID NO: 346, SEQ ID NO: 347, SEQ ID NO: 348, SEQ ID NO: 349, SEQ ID NO: 350, SEQ ID NO: 351, SEQ ID NO: 352, SEQ ID NO: 353, SEQ ID NO: 354, SEQ ID NO: 355, SEQ ID NO: 356, SEQ ID NO: 357, SEQ ID NO: 358, SEQ ID NO: 359, SEQ ID NO: 360, SEQ ID NO: 361, SEQ ID NO: 362, SEQ ID NO: 363, SEQ ID NO: 364, SEQ ID NO: 365, SEQ ID NO: 366, SEQ ID NO: 367, SEQ ID NO: 368, SEQ ID NO: 369, SEQ ID NO: 370, SEQ ID NO: 371, SEQ ID NO: 372, SEQ ID NO: 373, SEQ ID NO: 374, SEQ ID NO: 375, or SEQ ID NO: 376.

[0497] In some examples of any of the ABPCs described herein, the first antigen-binding domain includes a light chain variable domain comprising SEQ ID NO: 394, and a heavy chain variable domain comprising SEQ ID NO: 335, SEQ ID NO: 337, SEQ ID NO: 338, SEQ ID NO: 339, SEQ ID NO: SEQ ID NO: 340, SEQ ID NO: 341 SEQ ID NO: 342, SEQ ID NO: 343, SEQ ID NO: 344, SEQ ID NO: 345, SEQ ID NO: 346, SEQ ID NO: 347, SEQ ID NO: 348, SEQ ID NO: 349, SEQ ID NO: 350, SEQ ID NO: 351, SEQ ID NO: 352, SEQ ID NO: 353, SEQ ID NO: 354, SEQ ID NO: 355, SEQ ID NO: 356, SEQ ID NO: 357, SEQ ID NO: 358, SEQ ID NO: 359, SEQ ID NO: 360, SEQ ID NO: 361, SEQ ID NO: 362, SEQ ID NO: 363, SEQ ID NO: 364, SEQ ID NO: 365, SEQ ID NO: 366, SEQ ID NO: 367, SEQ ID NO: 368, SEQ ID NO: 369, SEQ ID NO: 370, SEQ ID NO: 371, SEQ ID NO: 372, SEQ ID NO: 373, SEQ ID NO: 374, SEQ ID NO: 375, or SEQ ID NO: 376.

[0498] In some examples of any of the ABPCs described herein, the first antigen-binding domain includes a light chain variable domain comprising SEQ ID NO: 395, and a heavy chain variable domain comprising SEQ ID NO: 335, SEQ ID NO: 337, SEQ ID NO: 338, SEQ ID NO: 339, SEQ ID NO: SEQ ID NO: 340, SEQ ID NO: 341 SEQ ID NO: 342, SEQ ID NO: 343, SEQ ID NO: 344, SEQ ID NO: 345, SEQ ID NO: 346, SEQ ID NO: 347, SEQ ID NO: 348, SEQ ID NO: 349, SEQ ID NO: 350, SEQ ID NO: 351, SEQ ID NO: 352, SEQ ID NO: 353, SEQ ID NO: 354, SEQ ID NO: 355, SEQ ID NO: 356, SEQ ID NO: 357, SEQ ID NO: 358, SEQ ID NO: 359, SEQ ID NO: 360, SEQ ID NO: 361, SEQ ID NO: 362, SEQ ID NO: 363, SEQ ID NO: 364, SEQ ID NO: 365, SEQ ID NO: 366, SEQ ID NO: 367, SEQ ID NO: 368, SEQ ID NO: 369, SEQ ID NO: 370, SEQ ID NO: 371, SEQ ID NO: 372, SEQ ID NO: 373, SEQ ID NO: 374, SEQ ID NO: 375, or SEQ ID NO: 376.

[0499] In some examples of any of the ABPCs described herein, the first antigen-binding domain includes a light chain variable domain comprising SEQ ID NO: 396, and a heavy chain variable domain comprising SEQ ID NO: 335, SEQ ID NO: 337, SEQ ID NO: 338, SEQ ID NO: 339, SEQ ID NO: SEQ ID NO: 340, SEQ ID NO: 341 SEQ ID NO: 342, SEQ ID NO: 343, SEQ ID NO: 344, SEQ ID NO: 345, SEQ ID NO: 346, SEQ ID NO: 347, SEQ ID NO: 348, SEQ ID NO: 349, SEQ ID NO: 350, SEQ ID NO: 351, SEQ ID NO: 352, SEQ ID NO: 353, SEQ ID NO: 354, SEQ ID NO: 355, SEQ ID NO: 356, SEQ ID NO: 357, SEQ ID NO: 358, SEQ ID NO: 359, SEQ ID NO: 360, SEQ ID NO: 361, SEQ ID NO: 362, SEQ ID NO: 363, SEQ ID NO: 364, SEQ ID NO: 365, SEQ ID NO: 366, SEQ ID NO: 367, SEQ ID NO: 368, SEQ ID NO: 369, SEQ ID NO: 370, SEQ ID NO: 371, SEQ ID NO: 372, SEQ ID NO: 373, SEQ ID NO: 374, SEQ ID NO: 375, or SEQ ID NO: 376.

[0500] In some examples of any of the ABPCs described herein, the first antigen-binding domain includes a light chain variable domain comprising SEQ ID NO: 397, and a heavy chain variable domain comprising SEQ ID NO: 335, SEQ ID NO: 337, SEQ ID NO: 338, SEQ ID NO: 339, SEQ ID NO: SEQ ID NO: 340, SEQ ID NO: 341 SEQ ID NO: 342, SEQ ID NO: 343, SEQ ID NO: 344, SEQ ID NO: 345, SEQ ID NO: 346, SEQ ID NO: 347, SEQ ID NO: 348, SEQ ID NO: 349, SEQ ID NO: 350, SEQ ID NO: 351, SEQ ID NO: 352, SEQ ID NO: 353, SEQ ID NO: 354, SEQ ID NO: 355, SEQ ID NO: 356, SEQ ID NO: 357, SEQ ID NO: 358, SEQ ID NO: 359, SEQ ID NO: 360, SEQ ID NO: 361, SEQ ID NO: 362, SEQ ID NO: 363, SEQ ID NO: 364, SEQ ID NO: 365, SEQ ID NO: 366, SEQ ID NO: 367, SEQ ID NO: 368, SEQ ID NO: 369, SEQ ID NO: 370, SEQ ID NO: 371, SEQ ID NO: 372, SEQ ID NO: 373, SEQ ID NO: 374, SEQ ID NO: 375, or SEQ ID NO: 376.

[0501] In some examples of any of the ABPCs described herein, the first antigen-binding domain includes a light chain variable domain comprising SEQ ID NO: 398, and a heavy chain variable domain comprising SEQ ID NO: 335, SEQ ID NO: 337, SEQ ID NO: 338, SEQ ID NO: 339, SEQ ID NO: SEQ ID NO: 340, SEQ ID NO: 341 SEQ ID NO: 342, SEQ ID NO: 343, SEQ ID NO: 344, SEQ ID NO: 345, SEQ ID NO: 346, SEQ ID NO: 347, SEQ ID NO: 348, SEQ ID NO: 349, SEQ ID NO: 350, SEQ ID NO: 351, SEQ ID NO: 352, SEQ ID NO: 353, SEQ ID NO: 354, SEQ ID NO: 355, SEQ ID NO: 356, SEQ ID NO: 357, SEQ ID NO: 358, SEQ ID NO: 359, SEQ ID NO: 360, SEQ ID NO: 361, SEQ ID NO: 362, SEQ ID NO: 363, SEQ ID NO: 364, SEQ ID NO: 365, SEQ ID NO: 366, SEQ ID NO: 367, SEQ ID NO: 368, SEQ ID NO: 369, SEQ ID NO: 370, SEQ ID NO: 371, SEQ ID NO: 372, SEQ ID NO: 373, SEQ ID NO: 374, SEQ ID NO: 375, or SEQ ID NO: 376.

[0502] In some examples of any of the ABPCs described herein, the first antigen-binding domain includes a light chain variable domain comprising SEQ ID NO: 399, and a heavy chain variable domain comprising SEQ ID NO: 335, SEQ ID NO: 337, SEQ ID NO: 338, SEQ ID NO: 339, SEQ ID NO: SEQ ID NO: 340, SEQ ID NO: 341 SEQ ID NO: 342, SEQ ID NO: 343, SEQ ID NO: 344, SEQ ID NO: 345, SEQ ID NO: 346, SEQ ID NO: 347, SEQ ID NO: 348, SEQ ID NO: 349, SEQ ID NO: 350, SEQ ID NO: 351, SEQ ID NO: 352, SEQ ID NO: 353, SEQ ID NO: 354, SEQ ID NO: 355, SEQ ID NO: 356, SEQ ID NO: 357, SEQ ID NO: 358, SEQ ID NO: 359, SEQ ID NO: 360, SEQ ID NO: 361, SEQ ID NO: 362, SEQ ID NO: 363, SEQ ID NO: 364, SEQ ID NO: 365, SEQ ID NO: 366, SEQ ID NO: 367, SEQ ID NO: 368, SEQ ID NO: 369, SEQ ID NO: 370, SEQ ID NO: 371, SEQ ID NO: 372, SEQ ID NO: 373, SEQ ID NO: 374, SEQ ID NO: 375, or SEQ ID NO: 376.

[0503] In some examples of any of the ABPCs described herein, the first antigen-binding domain includes a light chain variable domain comprising SEQ ID NO: 400, and a heavy chain variable domain comprising SEQ ID NO: 335, SEQ ID NO: 337, SEQ ID NO: 338, SEQ ID NO: 339, SEQ ID NO: SEQ ID NO: 340, SEQ ID NO: 341 SEQ ID NO: 342, SEQ ID NO: 343, SEQ ID NO: 344, SEQ ID NO: 345, SEQ ID NO: 346, SEQ ID NO: 347, SEQ ID NO: 348, SEQ ID NO: 349, SEQ ID NO: 350, SEQ ID NO: 351, SEQ ID NO: 352, SEQ ID NO: 353, SEQ ID NO: 354, SEQ ID NO: 355, SEQ ID NO: 356, SEQ ID NO: 357, SEQ ID NO: 358, SEQ ID NO: 359, SEQ ID NO: 360, SEQ ID NO: 361, SEQ ID NO: 362, SEQ ID NO: 363, SEQ ID NO: 364, SEQ ID NO: 365, SEQ ID NO: 366, SEQ ID NO: 367, SEQ ID NO: 368, SEQ ID NO: 369, SEQ ID NO: 370, SEQ ID NO: 371, SEQ ID NO: 372, SEQ ID NO: 373, SEQ ID NO: 374, SEQ ID NO: 375, or SEQ ID NO: 376.

[0504] In some examples of any of the ABPCs described herein, the first antigen-binding domain includes a heavy chain variable domain of SC16.25 with one or more (e.g., one, two, three, four, five, six, seven, eight, nine, ten, eleven, twelve, thirteen, fourteen, fifteen, sixteen, seventeen, eighteen, nineteen, or twenty) amino acids substituted with a histidine. In some examples of any of the ABPCs described herein, the first antigen-binding domain includes a light chain variable domain of SC16.25 with one or more (e.g., one, two, three, four, five, six, seven, eight, nine, ten, eleven, twelve, thirteen, fourteen, fifteen, sixteen, seventeen, eighteen, nineteen, or twenty) amino acids substituted with a histidine. In some examples of any of the ABPCs described herein, the first antigen-binding domain includes a heavy chain variable domain of SC16.25 with one or more (e.g., one, two, three, four, five, six, seven, eight, nine, ten, eleven, twelve, thirteen, fourteen, fifteen, sixteen, seventeen, eighteen, nineteen, or twenty) amino acids substituted with a histidine; and a light chain variable domain of SC16.25 with one or more (e.g., one, two, three, four, five, six, seven, eight, nine, ten, eleven, twelve, thirteen, fourteen, fifteen, sixteen, seventeen, eighteen, nineteen, or twenty) amino acids substituted with a histidine. In some examples of any of the ABPCs described herein, the heavy chain variable domain of SC16.25 comprises SEQ ID NO: 401. In some examples of any of the ABPCs described herein, the light chain variable domain of SC16.25 comprises SEQ ID NO: 402.

[0505] In some examples of any of the ABPCs described herein, the first antigen-binding domain comprises a heavy chain variable domain comprising a CDR1, a CDR2, and a CDR3 of SEQ ID NO: 640, SEQ ID NO: 641, and SEQ ID NO: 642, respectively, with collectively a total of one or more (e.g., one, two, three, four, five, six, seven, eight, nine, or ten) amino acid positions in SEQ ID NOs: 640-642 substituted with a histidine. In some examples of any of the ABPCs described herein, the first antigen-binding domain comprises a light chain variable domain comprising a CDR1, a CDR2, and a CDR3 of SEQ ID NO: 643 SEQ ID NO: 644, and SEQ ID NO: 645, respectively, with collectively a total of one or more (e.g., one, two, three, four, five, six, seven, eight, nine, or ten) amino acid positions in SEQ ID NOs: 643-645 substituted with a histidine. In some examples of any of the ABPCs described herein, the first antigen-binding domain includes: a heavy chain variable domain comprising a CDR1, a CDR2, and a CDR3 of SEQ ID NO: 640, SEQ ID NO: 641, and SEQ ID NO: 642, respectively, with collectively a total of one or more (e.g., one, two, three, four, five, six, seven, eight, nine, or ten) amino acid positions in SEQ ID NOs: 640-642 substituted with a histidine; and a light chain variable domain comprising a CDR1, a CDR2, and a CDR3 of SEQ ID NO: 643, SEQ ID NO: 644, and SEQ ID NO: 645, respectively, with collectively a total of one or more (e.g., one, two, three, four, five, six, seven, eight, nine, or ten) amino acid positions in SEQ ID NOs: 643-645 substituted with a histidine.

[0506] In some examples of any of the ABPCs described herein, the first antigen-binding domain includes a heavy chain variable domain that is at least 90% (e.g., at least 92%, at least 94%, at least 96%, at least 98%, at least 99%, or 100%) identical to SEQ ID NO: 401, where the heavy chain variable domain includes a histidine at one or more (e.g., one, two, three, four, five, six, seven, eight, nine, ten, eleven, twelve, thirteen, fourteen, fifteen, sixteen, seventeen, eighteen, nineteen, or twenty) amino acid positions in SEQ ID NO: 401 selected from the group consisting of: 27, 101, 103, 104, 108, and 109. In some examples of any of the ABPCs described herein, the first antigen-binding domain includes a light chain variable domain that is at least 90% (e.g., at least 92%, at least 94%, at least 96%, at least 98%, at least 99%, or 100%) identical to SEQ ID NO: 402, where the light chain variable domain includes a histidine at one or more (e.g., one, two, three, four, five, six, seven, eight, nine, ten, eleven, twelve, thirteen, fourteen, fifteen, sixteen, seventeen, eighteen, nineteen, or twenty) amino acid positions in SEQ ID NO: 402 selected from the group consisting of: 30 and 31. In some examples of any of the ABPCs described herein the first antigen-binding domain includes: a heavy chain variable domain that is at least 90% (e.g., at least 92%, at least 94%, at least 96%, at least 98%, at least 99%, or 100%) identical to SEQ ID NO: 401, where the heavy chain variable domain includes a histidine at one or more (e.g., one, two, three, four, five, six, seven, eight, nine, ten, eleven, twelve, thirteen, fourteen, fifteen, sixteen, seventeen, eighteen, nineteen, or twenty) amino acid positions in SEQ ID NO: 401 selected from the group consisting of: 27, 101, 103, 104, 108, and 109 and a light chain variable domain that is at least 90% (e.g., at least 92%, at least 94%, at least 96%, at least 98%, at least 99%, or 100%) identical to SEQ ID NO: 402, where the light chain variable domain includes a histidine at one or more (e.g., one, two, three, four, five, six, seven, eight, nine, ten, eleven, twelve, thirteen, fourteen, fifteen, sixteen, seventeen, eighteen, nineteen, or twenty) amino acid positions in SEQ ID NO: 402 selected from the group consisting of: 30 and 31.

[0507] In some examples of any of the ABPCs described herein, a heavy chain variable domain includes a heavy chain variable domain that is at least 90% (e.g., at least 92%, at least 94%, at least 96%, at least 98%, at least 99%, or 100%) identical to SEQ ID NO: 401, where the heavy chain variable domain includes a histidine at any of the specific combinations of one or more amino acid positions in SEQ ID NO: 401 listed in Table 9.

TABLE 9
Exemplary Combinations of Amino Acid Positions in SEQ
ID NO: 401 that can be substituted with histidine

27 + 101, 27 + 103, 27 + 104, 27 + 108, 27 + 109, 101 + 103, 101 + 104, 101 + 108, 101 +
109, 103 + 104, 103 + 108, 103 + 109, 104 + 108, 104 + 109, 108 + 109, 27 + 101 +
103, 27 + 101 + 104, 27 + 101 + 108, 27 + 101 + 109, 27 + 103 + 104, 27 + 103 + 108, 27 +
103 + 109, 27 + 104 + 108, 27 + 104 + 109, 27 + 108 + 109, 101 + 103 + 104, 101 + 103 +
108, 101 + 103 + 109, 101 + 104 + 108, 101 + 104 + 109, 101 + 108 + 109, 103 + 104 +
108, 103 + 104 + 109, 103 + 108 + 109, 104 + 108 + 109

[0508] In some examples of any of the ABPCs described herein, a light chain variable domain includes a light chain variable domain that is at least 90% (e.g., at least 92%, at least 94%, at least 96%, at least 98%, at least 99%, or 100%) identical to SEQ ID NO: 402, where the light chain variable domain includes a histidine at any of the specific combinations of one or more amino acid positions in SEQ ID NO: 402 listed in Table 10.

TABLE 10
Exemplary Combinations of Amino Acid Positions in SEQ
ID NO: 402 that can be substituted with histidine

30 + 31

[0509] In some examples of any of the ABPCs described herein, the first antigen-binding domain includes a heavy chain variable domain that is at least 90% (e.g., at least 92%, at least 94%, at least 96%, at least 98%, at least 99%, or 100%) identical to SEQ ID NO: 401, where the heavy chain variable domain includes a histidine at any of the specific combinations of one or more amino acid positions in SEQ ID NO: 401 listed in Table 9; and a light chain variable domain that that is at least 90% (e.g., at least 92%, at least 94%, at least 96%, at least 98%, at least 99%, or 100%) identical to SEQ ID NO: 402, where the light chain variable domain includes a histidine at any of the specific combinations of one or more amino acid positions in SEQ ID NO: 402 listed in Table 10.

[0510] In some examples of any of the ABPCs described herein, the first antigen-binding domain comprises a light chain variable domain that is at least 90% identical to SEQ ID NO: 402, wherein the light chain variable domain includes a histidine at position 30 in SEQ ID NO: 402; and a heavy chain variable domain that is at least 90% (e.g., at least 92%, at least 94%, at least 96%, at least 98%, at least 99%, or 100%) identical to SEQ ID NO: 401, where the heavy chain variable domain includes a histidine at any of the specific combinations of one or more amino acid positions in SEQ ID NO: 401 listed in Table 9.

[0511] In some examples of any of the ABPCs described herein, the first antigen-binding domain comprises a light chain variable domain comprising SEQ ID NO: 402, and a heavy chain variable domain that is at least 90% identical (e.g., at least 92%, at least 94%, at least 96%, at least 98%, at least 99%, or 100%) identical to SEQ ID NO: 401, where the heavy chain variable domain includes a histidine at any of the specific combinations of one or more (e.g., two, three, four, five, six, seven, eight, nine, or ten) amino acid positions in SEQ ID NO: 401 listed in Table 9.

[0512] In some examples of any of the ABPCs described herein, the first antigen-binding domain comprises a light chain variable domain that is at least 90% identical to SEQ ID NO: 402, wherein the light chain variable domain includes a histidine at position 31 in SEQ ID NO: 402; and a heavy chain variable domain that is at least 90% (e.g., at least 92%, at least 94%, at least 96%, at least 98%, at least 99%, or 100%) identical to SEQ ID NO: 401, where the heavy chain variable domain includes a histidine at any of the specific combinations of one or more amino acid positions in SEQ ID NO: 401 listed in Table 9.

[0513] In some examples of any of the ABPCs described herein, the first antigen-binding domain includes a heavy chain variable domain of SC16.25 with one or more (e.g., one, two, three, four, five, six, seven, eight, nine, ten, eleven, twelve, thirteen, fourteen, fifteen, sixteen, seventeen, eighteen, nineteen, or twenty) histidine(s) substituted with an alanine. In some examples of any of the ABPCs described herein, the first antigen-binding domain includes a light chain variable domain of SC16.25 with one or more (e.g., one, two, three, four, five, six, seven, eight, nine, ten, eleven, twelve, thirteen, fourteen, fifteen, sixteen, seventeen, eighteen, nineteen, or twenty) histidine(s) substituted with an alanine. In some examples of any of the ABPCs described herein, the first antigen-binding domain includes a heavy chain variable domain SC16.25 with one or more (e.g., one, two, three, four, five, six, seven, eight, nine, ten, eleven, twelve, thirteen, fourteen, fifteen, sixteen, seventeen, eighteen, nineteen, or twenty) histidines substituted with an alanine; and a light chain variable domain of SC16.25 with one or more (e.g., one, two, three, four, five, six, seven, eight, nine, ten, eleven, twelve, thirteen, fourteen, fifteen, sixteen, seventeen, eighteen, nineteen, or twenty) histidine(s) substituted with an alanine. In some examples of any of the ABPCs described herein, the heavy chain variable domain of SC16.25 comprises SEQ ID NO: 401. In some examples of any of the ABPCs described herein, the light chain variable domain of SC16.25 comprises SEQ ID NO: 402.

[0514] In some examples of any of the ABPCs described herein, the first antigen-binding domain comprises a heavy chain variable domain comprising a CDR1, a CDR2, and a CDR3 of SEQ ID NO: 640, SEQ ID NO: 641, and SEQ ID NO: 642, respectively, with collectively a total of one or more (e.g., one, two, three, four, five, six, seven, eight, nine, or ten) histidine(s) in SEQ ID NOs: 640-642 substituted with an alanine. In some examples of any of the ABPCs described herein, the first antigen-binding domain comprises a light chain variable domain comprising a CDR1, a CDR2, and a CDR3 of SEQ ID NO: 643, SEQ ID NO: 644, and SEQ ID NO: 645, respectively, with collectively a total of one or more (e.g., one, two, three, four, five, six, seven, eight, nine, or ten) histidine(s) in SEQ ID NOs: 643-645 substituted with an alanine. In some examples of any of the ABPCs described herein, the first antigen-binding domain includes: a heavy chain variable domain comprising a CDR1, a CDR2, and a CDR3 of SEQ ID NO: 640, SEQ ID NO: 641, and SEQ ID NO: 642, respectively, with collectively a total of one or more (e.g., one, two, three, four, five, six, seven, eight, nine, or ten) histidine(s) in SEQ ID NOs: 640-642 substituted with an alanine; and a light chain variable domain comprising a CDR1, a CDR2, and a CDR3 of SEQ ID NO: 643, SEQ ID NO: 644, and SEQ ID NO: 645, respectively, with collectively a total of one or more (e.g., one, two, three, four, five, six, seven, eight, nine, or ten) histidine(s) in SEQ ID NOs: 643-645 substituted with an alanine.

[0515] In some examples of any of the ABPCs described herein, the first antigen-binding domain comprises a heavy chain variable domain of SEQ ID NO: 401, SEQ ID NO: 403, SEQ ID NO: 404, SEQ ID NO: 405, SEQ ID NO: 406, SEQ ID NO: 407, SEQ ID NO: 408, SEQ ID NO: 409, SEQ ID NO: 410, SEQ ID NO: 411, SEQ ID NO: 412, SEQ ID NO: 413, SEQ ID NO: 414, SEQ ID NO: 415, SEQ ID NO: 416, SEQ ID NO: 417, SEQ ID NO: 418, SEQ ID NO: 419, SEQ ID NO: 420, SEQ ID NO: 421, SEQ ID NO: 422, SEQ ID NO: 423, SEQ ID NO: 424, SEQ ID NO: 425, SEQ ID NO: 426, SEQ ID NO: 427, SEQ ID NO: 428, SEQ ID NO: 429, SEQ ID NO: 430, SEQ ID NO: 431, SEQ ID NO: 432, SEQ ID NO: 433, SEQ ID NO: 434, SEQ ID NO: 435, SEQ ID NO: 436, SEQ ID NO: 437, SEQ ID NO: 438, SEQ ID NO: 439, SEQ ID NO: 440, SEQ ID NO: 441, SEQ ID NO: 442, SEQ ID NO: 443, SEQ ID NO: 444, SEQ ID NO: 445, or SEQ ID NO: 446.

[0516] In some examples of any of the ABPCs described herein, the first antigen-binding domain includes a light chain variable domain of SEQ ID NO: 402, SEQ ID NO: 447, SEQ ID NO: 448, SEQ ID NO: 449, SEQ ID NO: 450, SEQ ID NO: 451, SEQ ID NO: 452, SEQ ID NO: 453, SEQ ID NO: 454, SEQ ID NO: 455, SEQ ID NO: 456, SEQ ID NO: 457, SEQ ID NO: 458, SEQ ID NO: 459, SEQ ID NO: 460, SEQ ID NO: 461, SEQ ID NO: 462, SEQ ID NO: 463, SEQ ID NO: 464, SEQ ID NO: 465, SEQ ID NO: 466, SEQ ID NO: 467, SEQ ID NO: 468, or SEQ ID NO: 469.

[0517] In some examples of any of the ABPCs described herein, the first antigen-binding domain includes a light chain variable domain comprising SEQ ID NO: 402, and a heavy chain variable domain comprising SEQ ID NO: 401, SEQ ID NO: 403, SEQ ID NO: 404, SEQ ID NO: 405, SEQ ID NO: 406, SEQ ID NO: 407, SEQ ID NO: 408, SEQ ID NO: 409, SEQ ID NO: 410, SEQ ID NO: 411, SEQ ID NO: 412, SEQ ID NO: 413, SEQ ID NO: 414, SEQ ID NO: 415, SEQ ID NO: 416, SEQ ID NO: 417, SEQ ID NO: 418, SEQ ID NO: 419, SEQ ID NO: 420, SEQ ID NO: 421, SEQ ID NO: 422, SEQ ID NO: 423, SEQ ID NO: 424, SEQ ID NO: 425, SEQ ID NO: 426, SEQ ID NO: 427, SEQ ID NO: 428, SEQ ID NO: 429, SEQ ID NO: 430, SEQ ID NO: 431, SEQ ID NO: 432, SEQ ID NO: 433, SEQ ID NO: 434, SEQ ID NO: 435, SEQ ID NO: 436, SEQ ID NO: 437, SEQ ID NO: 438, SEQ ID NO: 439, SEQ ID NO: 440, SEQ ID NO: 441, SEQ ID NO: 442, SEQ ID NO: 443, SEQ ID NO: 444, SEQ ID NO: 445, or SEQ ID NO: 446.

[0518] In some examples of any of the ABPCs described herein, the first antigen-binding domain includes a light chain variable domain comprising SEQ ID NO: 447, and a heavy chain variable domain comprising SEQ ID NO: 401, SEQ ID NO: 403, SEQ ID NO: 404, SEQ ID NO: 405, SEQ ID NO: 406, SEQ ID NO: 407, SEQ ID NO: 408, SEQ ID NO: 409, SEQ ID NO: 410, SEQ ID NO: 411, SEQ ID NO: 412, SEQ ID NO: 413, SEQ ID NO: 414, SEQ ID NO: 415, SEQ ID NO: 416, SEQ ID NO: 417, SEQ ID NO: 418, SEQ ID NO: 419, SEQ ID NO: 420, SEQ ID NO: 421, SEQ ID NO: 422, SEQ ID NO: 423, SEQ ID NO: 424, SEQ ID NO: 425, SEQ ID NO: 426, SEQ ID NO: 427, SEQ ID NO: 428, SEQ ID NO: 429, SEQ ID NO: 430, SEQ ID NO: 431, SEQ ID NO: 432, SEQ ID NO: 433, SEQ ID NO: 434, SEQ ID NO: 435, SEQ ID NO: 436, SEQ ID NO: 437, SEQ ID NO: 438, SEQ ID NO: 439, SEQ ID NO: 440, SEQ ID NO: 441, SEQ ID NO: 442, SEQ ID NO: 443, SEQ ID NO: 444, SEQ ID NO: 445, or SEQ ID NO: 446.

[0519] In some examples of any of the ABPCs described herein, the first antigen-binding domain includes a light chain variable domain comprising SEQ ID NO: 448, and a heavy chain variable domain comprising SEQ ID NO: 401, SEQ ID NO: 403, SEQ ID NO: 404, SEQ ID NO: 405, SEQ ID NO: 406, SEQ ID NO: 407, SEQ ID NO: 408, SEQ ID NO: 409, SEQ ID NO: 410, SEQ ID NO: 411, SEQ ID NO: 412, SEQ ID NO: 413, SEQ ID NO: 414, SEQ ID NO: 415, SEQ ID NO: 416, SEQ ID NO: 417, SEQ ID NO: 418, SEQ ID NO: 419, SEQ ID NO: 420, SEQ ID NO: 421, SEQ ID NO: 422, SEQ ID NO: 423, SEQ ID NO: 424, SEQ ID NO: 425, SEQ ID NO: 426, SEQ ID NO: 427, SEQ ID NO: 428, SEQ ID NO: 429, SEQ ID NO: 430, SEQ ID NO: 431, SEQ ID NO: 432, SEQ ID NO: 433, SEQ ID NO: 434, SEQ ID NO: 435, SEQ ID NO: 436, SEQ ID NO: 437, SEQ ID NO: 438, SEQ ID NO: 439, SEQ ID NO: 440, SEQ ID NO: 441, SEQ ID NO: 442, SEQ ID NO: 443, SEQ ID NO: 444, SEQ ID NO: 445, or SEQ ID NO: 446.

[0520] In some examples of any of the ABPCs described herein, the first antigen-binding domain includes a light chain variable domain comprising SEQ ID NO: 449, and a heavy chain variable domain comprising SEQ ID NO: 401, SEQ ID NO: 403, SEQ ID NO: 404, SEQ ID NO: 405, SEQ ID NO: 406, SEQ ID NO: 407, SEQ ID NO: 408, SEQ ID NO: 409, SEQ ID NO: 410, SEQ ID NO: 411, SEQ ID NO: 412, SEQ ID NO: 413, SEQ ID NO: 414, SEQ ID NO: 415, SEQ ID NO: 416, SEQ ID NO: 417, SEQ ID NO: 418, SEQ ID NO: 419, SEQ ID NO: 420, SEQ ID NO: 421, SEQ ID NO: 422, SEQ ID NO: 423, SEQ ID NO: 424, SEQ ID NO: 425, SEQ ID NO: 426, SEQ ID NO: 427, SEQ ID NO: 428, SEQ ID NO: 429, SEQ ID NO: 430, SEQ ID NO: 431, SEQ ID NO: 432, SEQ ID NO: 433, SEQ ID NO: 434, SEQ ID NO: 435, SEQ ID NO: 436, SEQ ID NO: 437, SEQ ID NO: 438, SEQ ID NO: 439, SEQ ID NO: 440, SEQ ID NO: 441, SEQ ID NO: 442, SEQ ID NO: 443, SEQ ID NO: 444, SEQ ID NO: 445, or SEQ ID NO: 446.

[0521] In some examples of any of the ABPCs described herein, the first antigen-binding domain includes a light chain variable domain comprising SEQ ID NO: 450, and a heavy chain variable domain comprising SEQ ID NO: 401, SEQ ID NO: 403, SEQ ID NO: 404, SEQ ID NO: 405, SEQ ID NO: 406, SEQ ID NO: 407, SEQ ID NO: 408, SEQ ID NO: 409, SEQ ID NO: 410, SEQ ID NO: 411, SEQ ID NO: 412, SEQ ID NO: 413, SEQ ID NO: 414, SEQ ID NO: 415, SEQ ID NO: 416, SEQ ID NO: 417, SEQ ID NO: 418, SEQ ID NO: 419, SEQ ID NO: 420, SEQ ID NO: 421, SEQ ID NO: 422, SEQ ID NO: 423, SEQ ID NO: 424, SEQ ID NO: 425, SEQ ID NO: 426, SEQ ID NO: 427, SEQ ID NO: 428, SEQ ID NO: 429, SEQ ID NO: 430, SEQ ID NO: 431, SEQ ID NO: 432, SEQ ID NO: 433, SEQ ID NO: 434, SEQ ID NO: 435, SEQ ID NO: 436, SEQ ID NO: 437, SEQ ID NO: 438, SEQ ID NO: 439, SEQ ID NO: 440, SEQ ID NO: 441, SEQ ID NO: 442, SEQ ID NO: 443, SEQ ID NO: 444, SEQ ID NO: 445, or SEQ ID NO: 446.

[0522] In some examples of any of the ABPCs described herein, the first antigen-binding domain includes a light chain variable domain comprising SEQ ID NO: 451, and a heavy chain variable domain comprising SEQ ID NO: 401, SEQ ID NO: 403, SEQ ID NO: 404, SEQ ID NO: 405, SEQ ID NO: 406, SEQ ID NO: 407, SEQ ID NO: 408, SEQ ID NO: 409, SEQ ID NO: 410, SEQ ID NO: 411, SEQ ID NO: 412, SEQ ID NO: 413, SEQ ID NO: 414, SEQ ID NO: 415, SEQ ID NO: 416, SEQ ID NO: 417, SEQ ID NO: 418, SEQ ID NO: 419, SEQ ID NO: 420, SEQ ID NO: 421, SEQ ID NO: 422, SEQ ID NO: 423, SEQ ID NO: 424, SEQ ID NO: 425, SEQ ID NO: 426, SEQ ID NO: 427, SEQ ID NO: 428, SEQ ID NO: 429, SEQ ID NO: 430, SEQ ID NO: 431, SEQ ID NO: 432, SEQ ID NO: 433, SEQ ID NO: 434, SEQ ID NO: 435, SEQ ID NO: 436, SEQ ID NO: 437, SEQ ID NO: 438, SEQ ID NO: 439, SEQ ID NO: 440, SEQ ID NO: 441, SEQ ID NO: 442, SEQ ID NO: 443, SEQ ID NO: 444, SEQ ID NO: 445, or SEQ ID NO: 446.

[0523] In some examples of any of the ABPCs described herein, the first antigen-binding domain includes a light chain variable domain comprising SEQ ID NO: 452, and a heavy chain variable domain comprising SEQ ID NO: 401, SEQ ID NO: 403, SEQ ID NO: 404, SEQ ID NO: 405, SEQ ID NO: 406, SEQ ID NO: 407, SEQ ID NO: 408, SEQ ID NO: 409, SEQ ID NO: 410, SEQ ID NO: 411, SEQ ID NO: 412, SEQ ID NO: 413, SEQ ID NO: 414, SEQ ID NO: 415, SEQ ID NO: 416, SEQ ID NO: 417, SEQ ID NO: 418, SEQ ID NO: 419, SEQ ID NO: 420, SEQ ID NO: 421, SEQ ID NO: 422, SEQ ID NO: 423, SEQ ID NO: 424, SEQ ID NO: 425, SEQ ID NO: 426, SEQ ID NO: 427, SEQ ID NO: 428, SEQ ID NO: 429, SEQ ID NO: 430, SEQ ID NO: 431, SEQ ID NO: 432, SEQ ID NO: 433, SEQ ID NO: 434, SEQ ID NO: 435, SEQ ID NO: 436, SEQ ID NO: 437, SEQ ID NO: 438, SEQ ID NO: 439, SEQ ID NO: 440, SEQ ID NO: 441, SEQ ID NO: 442, SEQ ID NO: 443, SEQ ID NO: 444, SEQ ID NO: 445, or SEQ ID NO: 446.

[0524] In some examples of any of the ABPCs described herein, the first antigen-binding domain includes a light chain variable domain comprising SEQ ID NO: 453, and a heavy chain variable domain comprising SEQ ID NO: 401, SEQ ID NO: 403, SEQ ID NO: 404, SEQ ID NO: 405, SEQ ID NO: 406, SEQ ID NO: 407, SEQ ID NO: 408, SEQ ID NO: 409, SEQ ID NO: 410, SEQ ID NO: 411, SEQ ID NO: 412, SEQ ID NO: 413, SEQ ID NO: 414, SEQ ID NO: 415, SEQ ID NO: 416, SEQ ID NO: 417, SEQ ID NO: 418, SEQ ID NO: 419, SEQ ID NO: 420, SEQ ID NO: 421, SEQ ID NO: 422, SEQ ID NO: 423, SEQ ID NO: 424, SEQ ID NO: 425, SEQ ID NO: 426, SEQ ID NO: 427, SEQ ID NO: 428, SEQ ID NO: 429, SEQ ID NO: 430, SEQ ID NO: 431, SEQ ID NO: 432, SEQ ID NO: 433, SEQ ID NO: 434, SEQ ID NO: 435, SEQ ID NO: 436, SEQ ID NO: 437, SEQ ID NO: 438, SEQ ID NO: 439, SEQ ID NO: 440, SEQ ID NO: 441, SEQ ID NO: 442, SEQ ID NO: 443, SEQ ID NO: 444, SEQ ID NO: 445, or SEQ ID NO: 446.

[0525] In some examples of any of the ABPCs described herein, the first antigen-binding domain includes a light chain variable domain comprising SEQ ID NO: 454, and a heavy chain variable domain comprising SEQ ID NO: 401, SEQ ID NO: 403, SEQ ID NO: 404, SEQ ID NO: 405, SEQ ID NO: 406, SEQ ID NO: 407, SEQ ID NO: 408, SEQ ID NO: 409, SEQ ID NO: 410, SEQ ID NO: 411, SEQ ID NO: 412, SEQ ID NO: 413, SEQ ID NO: 414, SEQ ID NO: 415, SEQ ID NO: 416, SEQ ID NO: 417, SEQ ID NO: 418, SEQ ID NO: 419, SEQ ID NO: 420, SEQ ID NO: 421, SEQ ID NO: 422, SEQ ID NO: 423, SEQ ID NO: 424, SEQ ID NO: 425, SEQ ID NO: 426, SEQ ID NO: 427, SEQ ID NO: 428, SEQ ID NO: 429, SEQ ID NO: 430, SEQ ID NO: 431, SEQ ID NO: 432, SEQ ID NO: 433, SEQ ID NO: 434, SEQ ID NO: 435, SEQ ID NO: 436, SEQ ID NO: 437, SEQ ID NO: 438, SEQ ID NO: 439, SEQ ID NO: 440, SEQ ID NO: 441, SEQ ID NO: 442, SEQ ID NO: 443, SEQ ID NO: 444, SEQ ID NO: 445, or SEQ ID NO: 446.

[0526] In some examples of any of the ABPCs described herein, the first antigen-binding domain includes a light chain variable domain comprising SEQ ID NO: 455, and a heavy chain variable domain comprising SEQ ID NO: 401, SEQ ID NO: 403, SEQ ID NO: 404, SEQ ID NO: 405, SEQ ID NO: 406, SEQ ID NO: 407, SEQ ID NO: 408, SEQ ID NO: 409, SEQ ID NO: 410, SEQ ID NO: 411, SEQ ID NO: 412, SEQ ID NO: 413, SEQ ID NO: 414, SEQ ID NO: 415, SEQ ID NO: 416, SEQ ID NO: 417, SEQ ID NO: 418, SEQ ID NO: 419, SEQ ID NO: 420, SEQ ID NO: 421, SEQ ID NO: 422, SEQ ID NO: 423, SEQ ID NO: 424, SEQ ID NO: 425, SEQ ID NO: 426, SEQ ID NO: 427, SEQ ID NO: 428, SEQ ID NO: 429, SEQ ID NO: 430, SEQ ID NO: 431, SEQ ID NO: 432, SEQ ID NO: 433, SEQ ID NO: 434, SEQ ID NO: 435, SEQ ID NO: 436, SEQ ID NO: 437, SEQ ID NO: 438, SEQ ID NO: 439, SEQ ID NO: 440, SEQ ID NO: 441, SEQ ID NO: 442, SEQ ID NO: 443, SEQ ID NO: 444, SEQ ID NO: 445, or SEQ ID NO: 446.

[0527] In some examples of any of the ABPCs described herein, the first antigen-binding domain includes a light chain variable domain comprising SEQ ID NO: 456, and a heavy chain variable domain comprising SEQ ID NO: 401, SEQ ID NO: 403, SEQ ID NO: 404, SEQ ID NO: 405, SEQ ID NO: 406, SEQ ID NO: 407, SEQ ID NO: 408, SEQ ID NO: 409, SEQ ID NO: 410, SEQ ID NO: 411, SEQ ID NO: 412, SEQ ID NO: 413, SEQ ID NO: 414, SEQ ID NO: 415, SEQ ID NO: 416, SEQ ID NO: 417, SEQ ID NO: 418, SEQ ID NO: 419, SEQ ID NO: 420, SEQ ID NO: 421, SEQ ID NO: 422, SEQ ID NO: 423, SEQ ID NO: 424, SEQ ID NO: 425, SEQ ID NO: 426, SEQ ID NO: 427, SEQ ID NO: 428, SEQ ID NO: 429, SEQ ID NO: 430, SEQ ID NO: 431, SEQ ID NO: 432, SEQ ID NO: 433, SEQ ID NO: 434, SEQ ID NO: 435, SEQ ID NO: 436, SEQ ID NO: 437, SEQ ID NO: 438, SEQ ID NO: 439, SEQ ID NO: 440, SEQ ID NO: 441, SEQ ID NO: 442, SEQ ID NO: 443, SEQ ID NO: 444, SEQ ID NO: 445, or SEQ ID NO: 446.

[0528] In some examples of any of the ABPCs described herein, the first antigen-binding domain includes a light chain variable domain comprising SEQ ID NO: 457, and a heavy chain variable domain comprising SEQ ID NO: 401, SEQ ID NO: 403, SEQ ID NO: 404, SEQ ID NO: 405, SEQ ID NO: 406, SEQ ID NO: 407, SEQ ID NO: 408, SEQ ID NO: 409, SEQ ID NO: 410, SEQ ID NO: 411, SEQ ID NO: 412, SEQ ID NO: 413, SEQ ID NO: 414, SEQ ID NO: 415, SEQ ID NO: 416, SEQ ID NO: 417, SEQ ID NO: 418, SEQ ID NO: 419, SEQ ID NO: 420, SEQ ID NO: 421, SEQ ID NO: 422, SEQ ID NO: 423, SEQ ID NO: 424, SEQ ID NO: 425, SEQ ID NO: 426, SEQ ID NO: 427, SEQ ID NO: 428, SEQ ID NO: 429, SEQ ID NO: 430, SEQ ID NO: 431, SEQ ID NO: 432, SEQ ID NO: 433, SEQ ID NO: 434, SEQ ID NO: 435, SEQ ID NO: 436, SEQ ID NO: 437, SEQ ID NO: 438, SEQ ID NO: 439, SEQ ID NO: 440, SEQ ID NO: 441, SEQ ID NO: 442, SEQ ID NO: 443, SEQ ID NO: 444, SEQ ID NO: 445, or SEQ ID NO: 446.

[0529] In some examples of any of the ABPCs described herein, the first antigen-binding domain includes a light chain variable domain comprising SEQ ID NO: 458, and a heavy chain variable domain comprising SEQ ID NO: 401, SEQ ID NO: 403, SEQ ID NO: 404, SEQ ID NO: 405, SEQ ID NO: 406, SEQ ID NO: 407, SEQ ID NO: 408, SEQ ID NO: 409, SEQ ID NO: 410, SEQ ID NO: 411, SEQ ID NO: 412, SEQ ID NO: 413, SEQ ID NO: 414, SEQ ID NO: 415, SEQ ID NO: 416, SEQ ID NO: 417, SEQ ID NO: 418, SEQ ID NO: 419, SEQ ID NO: 420, SEQ ID NO: 421, SEQ ID NO: 422, SEQ ID NO: 423, SEQ ID NO: 424, SEQ ID NO: 425, SEQ ID NO: 426, SEQ ID NO: 427, SEQ ID NO: 428, SEQ ID NO: 429, SEQ ID NO: 430, SEQ ID NO: 431, SEQ ID NO: 432, SEQ ID NO: 433, SEQ ID NO: 434, SEQ ID NO: 435, SEQ ID NO: 436, SEQ ID NO: 437, SEQ ID NO: 438, SEQ ID NO: 439, SEQ ID NO: 440, SEQ ID NO: 441, SEQ ID NO: 442, SEQ ID NO: 443, SEQ ID NO: 444, SEQ ID NO: 445, or SEQ ID NO: 446.

[0530] In some examples of any of the ABPCs described herein, the first antigen-binding domain includes a light chain variable domain comprising SEQ ID NO: 459, and a heavy chain variable domain comprising SEQ ID NO: 401, SEQ ID NO: 403, SEQ ID NO: 404, SEQ ID NO: 405, SEQ ID NO: 406, SEQ ID NO: 407, SEQ ID NO: 408, SEQ ID NO: 409, SEQ ID NO: 410, SEQ ID NO: 411, SEQ ID NO: 412, SEQ ID NO: 413, SEQ ID NO: 414, SEQ ID NO: 415, SEQ ID NO: 416, SEQ ID NO: 417, SEQ ID NO: 418, SEQ ID NO: 419, SEQ ID NO: 420, SEQ ID NO: 421, SEQ ID NO: 422, SEQ ID NO: 423, SEQ ID NO: 424, SEQ ID NO: 425, SEQ ID NO: 426, SEQ ID NO: 427, SEQ ID NO: 428, SEQ ID NO: 429, SEQ ID NO: 430, SEQ ID NO: 431, SEQ ID NO: 432, SEQ ID NO: 433, SEQ ID NO: 434, SEQ ID NO: 435, SEQ ID NO: 436, SEQ ID NO: 437, SEQ ID NO: 438, SEQ ID NO: 439, SEQ ID NO: 440, SEQ ID NO: 441, SEQ ID NO: 442, SEQ ID NO: 443, SEQ ID NO: 444, SEQ ID NO: 445, or SEQ ID NO: 446.

[0531] In some examples of any of the ABPCs described herein, the first antigen-binding domain includes a light chain variable domain comprising SEQ ID NO: 460, and a heavy chain variable domain comprising SEQ ID NO: 401, SEQ ID NO: 403, SEQ ID NO: 404, SEQ ID NO: 405, SEQ ID NO: 406, SEQ ID NO: 407, SEQ ID NO: 408, SEQ ID NO: 409, SEQ ID NO: 410, SEQ ID NO: 411, SEQ ID NO: 412, SEQ ID NO: 413, SEQ ID NO: 414, SEQ ID NO: 415, SEQ ID NO: 416, SEQ ID NO: 417, SEQ ID NO: 418, SEQ ID NO: 419, SEQ ID NO: 420, SEQ ID NO: 421, SEQ ID NO: 422, SEQ ID NO: 423, SEQ ID NO: 424, SEQ ID NO: 425, SEQ ID NO: 426, SEQ ID NO: 427, SEQ ID NO: 428, SEQ ID NO: 429, SEQ ID NO: 430, SEQ ID NO: 431, SEQ ID NO: 432, SEQ ID NO: 433, SEQ ID NO: 434, SEQ ID NO: 435, SEQ ID NO: 436, SEQ ID NO: 437, SEQ ID NO: 438, SEQ ID NO: 439, SEQ ID NO: 440, SEQ ID NO: 441, SEQ ID NO: 442, SEQ ID NO: 443, SEQ ID NO: 444, SEQ ID NO: 445, or SEQ ID NO: 446.

[0532] In some examples of any of the ABPCs described herein, the first antigen-binding domain includes a light chain variable domain comprising SEQ ID NO: 461, and a heavy chain variable domain comprising SEQ ID NO: 401, SEQ ID NO: 403, SEQ ID NO: 404, SEQ ID NO: 405, SEQ ID NO: 406, SEQ ID NO: 407, SEQ ID NO: 408, SEQ ID NO: 409, SEQ ID NO: 410, SEQ ID NO: 411, SEQ ID NO: 412, SEQ ID NO: 413, SEQ ID NO: 414, SEQ ID NO: 415, SEQ ID NO: 416, SEQ ID NO: 417, SEQ ID NO: 418, SEQ ID NO: 419, SEQ ID NO: 420, SEQ ID NO: 421, SEQ ID NO: 422, SEQ ID NO: 423, SEQ ID NO: 424, SEQ ID NO: 425, SEQ ID NO: 426, SEQ ID NO: 427, SEQ ID NO: 428, SEQ ID NO: 429, SEQ ID NO: 430, SEQ ID NO: 431, SEQ ID NO: 432, SEQ ID NO: 433, SEQ ID NO: 434, SEQ ID NO: 435, SEQ ID NO: 436, SEQ ID NO: 437, SEQ ID NO: 438, SEQ ID NO: 439, SEQ ID NO: 440, SEQ ID NO: 441, SEQ ID NO: 442, SEQ ID NO: 443, SEQ ID NO: 444, SEQ ID NO: 445, or SEQ ID NO: 446.

[0533] In some examples of any of the ABPCs described herein, the first antigen-binding domain includes a light chain variable domain comprising SEQ ID NO: 462, and a heavy chain variable domain comprising SEQ ID NO: 401, SEQ ID NO: 403, SEQ ID NO: 404, SEQ ID NO: 405, SEQ ID NO: 406, SEQ ID NO: 407, SEQ ID NO: 408, SEQ ID NO: 409, SEQ ID NO: 410, SEQ ID NO: 411, SEQ ID NO: 412, SEQ ID NO: 413, SEQ ID NO: 414, SEQ ID NO: 415, SEQ ID NO: 416, SEQ ID NO: 417, SEQ ID NO: 418, SEQ ID NO: 419, SEQ ID NO: 420, SEQ ID NO: 421, SEQ ID NO: 422, SEQ ID NO: 423, SEQ ID NO: 424, SEQ ID NO: 425, SEQ ID NO: 426, SEQ ID NO: 427, SEQ ID NO: 428, SEQ ID NO: 429, SEQ ID NO: 430, SEQ ID NO: 431, SEQ ID NO: 432, SEQ ID NO: 433, SEQ ID NO: 434, SEQ ID NO: 435, SEQ ID NO: 436, SEQ ID NO: 437, SEQ ID NO: 438, SEQ ID NO: 439, SEQ ID NO: 440, SEQ ID NO: 441, SEQ ID NO: 442, SEQ ID NO: 443, SEQ ID NO: 444, SEQ ID NO: 445, or SEQ ID NO: 446.

[0534] In some examples of any of the ABPCs described herein, the first antigen-binding domain includes a light chain variable domain comprising SEQ ID NO: 463, and a heavy chain variable domain comprising SEQ ID NO: 401, SEQ ID NO: 403, SEQ ID NO: 404, SEQ ID NO: 405, SEQ ID NO: 406, SEQ ID NO: 407, SEQ ID NO: 408, SEQ ID NO: 409, SEQ ID NO: 410, SEQ ID NO: 411, SEQ ID NO: 412, SEQ ID NO: 413, SEQ ID NO: 414, SEQ ID NO: 415, SEQ ID NO: 416, SEQ ID NO: 417, SEQ ID NO: 418, SEQ ID NO: 419, SEQ ID NO: 420, SEQ ID NO: 421, SEQ ID NO: 422, SEQ ID NO: 423, SEQ ID NO: 424, SEQ ID NO: 425, SEQ ID NO: 426, SEQ ID NO: 427, SEQ ID NO: 428, SEQ ID NO: 429, SEQ ID NO: 430, SEQ ID NO: 431, SEQ ID NO: 432, SEQ ID NO: 433, SEQ ID NO: 434, SEQ ID NO: 435, SEQ ID NO: 436, SEQ ID NO: 437, SEQ ID NO: 438, SEQ ID NO: 439, SEQ ID NO: 440, SEQ ID NO: 441, SEQ ID NO: 442, SEQ ID NO: 443, SEQ ID NO: 444, SEQ ID NO: 445, or SEQ ID NO: 446.

[0535] In some examples of any of the ABPCs described herein, the first antigen-binding domain includes a light chain variable domain comprising SEQ ID NO: 464, and a heavy chain variable domain comprising SEQ ID NO: 401, SEQ ID NO: 403, SEQ ID NO: 404, SEQ ID NO: 405, SEQ ID NO: 406, SEQ ID NO: 407, SEQ ID NO: 408, SEQ ID NO: 409, SEQ ID NO: 410, SEQ ID NO: 411, SEQ ID NO: 412, SEQ ID NO: 413, SEQ ID NO: 414, SEQ ID NO: 415, SEQ ID NO: 416, SEQ ID NO: 417, SEQ ID NO: 418, SEQ ID NO: 419, SEQ ID NO: 420, SEQ ID NO: 421, SEQ ID NO: 422, SEQ ID NO: 423, SEQ ID NO: 424, SEQ ID NO: 425, SEQ ID NO: 426, SEQ ID NO: 427, SEQ ID NO: 428, SEQ ID NO: 429, SEQ ID NO: 430, SEQ ID NO: 431, SEQ ID NO: 432, SEQ ID NO: 433, SEQ ID NO: 434, SEQ ID NO: 435, SEQ ID NO: 436, SEQ ID NO: 437, SEQ ID NO: 438, SEQ ID NO: 439, SEQ ID NO: 440, SEQ ID NO: 441, SEQ ID NO: 442, SEQ ID NO: 443, SEQ ID NO: 444, SEQ ID NO: 445, or SEQ ID NO: 446.

[0536] In some examples of any of the ABPCs described herein, the first antigen-binding domain includes a light chain variable domain comprising SEQ ID NO: 465, and a heavy chain variable domain comprising SEQ ID NO: 401, SEQ ID NO: 403, SEQ ID NO: 404, SEQ ID NO: 405, SEQ ID NO: 406, SEQ ID NO: 407, SEQ ID NO: 408, SEQ ID NO: 409, SEQ ID NO: 410, SEQ ID NO: 411, SEQ ID NO: 412, SEQ ID NO: 413, SEQ ID NO: 414, SEQ ID NO: 415, SEQ ID NO: 416, SEQ ID NO: 417, SEQ ID NO: 418, SEQ ID NO: 419, SEQ ID NO: 420, SEQ ID NO: 421, SEQ ID NO: 422, SEQ ID NO: 423, SEQ ID NO: 424, SEQ ID NO: 425, SEQ ID NO: 426, SEQ ID NO: 427, SEQ ID NO: 428, SEQ ID NO: 429, SEQ ID NO: 430, SEQ ID NO: 431, SEQ ID NO: 432, SEQ ID NO: 433, SEQ ID NO: 434, SEQ ID NO: 435, SEQ ID NO: 436, SEQ ID NO: 437, SEQ ID NO: 438, SEQ ID NO: 439, SEQ ID NO: 440, SEQ ID NO: 441, SEQ ID NO: 442, SEQ ID NO: 443, SEQ ID NO: 444, SEQ ID NO: 445, or SEQ ID NO: 446.

[0537] In some examples of any of the ABPCs described herein, the first antigen-binding domain includes a light chain variable domain comprising SEQ ID NO: 466, and a heavy chain variable domain comprising SEQ ID NO: 401, SEQ ID NO: 403, SEQ ID NO: 404, SEQ ID NO: 405, SEQ ID NO: 406, SEQ ID NO: 407, SEQ ID NO: 408, SEQ ID NO: 409, SEQ ID NO: 410, SEQ ID NO: 411, SEQ ID NO: 412, SEQ ID NO: 413, SEQ ID NO: 414, SEQ ID NO: 415, SEQ ID NO: 416, SEQ ID NO: 417, SEQ ID NO: 418, SEQ ID NO: 419, SEQ ID NO: 420, SEQ ID NO: 421, SEQ ID NO: 422, SEQ ID NO: 423, SEQ ID NO: 424, SEQ ID NO: 425, SEQ ID NO: 426, SEQ ID NO: 427, SEQ ID NO: 428, SEQ ID NO: 429, SEQ ID NO: 430, SEQ ID NO: 431, SEQ ID NO: 432, SEQ ID NO: 433, SEQ ID NO: 434, SEQ ID NO: 435, SEQ ID NO: 436, SEQ ID NO: 437, SEQ ID NO: 438, SEQ ID NO: 439, SEQ ID NO: 440, SEQ ID NO: 441, SEQ ID NO: 442, SEQ ID NO: 443, SEQ ID NO: 444, SEQ ID NO: 445, or SEQ ID NO: 446.

[0538] In some examples of any of the ABPCs described herein, the first antigen-binding domain includes a light chain variable domain comprising SEQ ID NO: 467, and a heavy chain variable domain comprising SEQ ID NO: 401, SEQ ID NO: 403, SEQ ID NO: 404, SEQ ID NO: 405, SEQ ID NO: 406, SEQ ID NO: 407, SEQ ID NO: 408, SEQ ID NO: 409, SEQ ID NO: 410, SEQ ID NO: 411, SEQ ID NO: 412, SEQ ID NO: 413, SEQ ID NO: 414, SEQ ID NO: 415, SEQ ID NO: 416, SEQ ID NO: 417, SEQ ID NO: 418, SEQ ID NO: 419, SEQ ID NO: 420, SEQ ID NO: 421, SEQ ID NO: 422, SEQ ID NO: 423, SEQ ID NO: 424, SEQ ID NO: 425, SEQ ID NO: 426, SEQ ID NO: 427, SEQ ID NO: 428, SEQ ID NO: 429, SEQ ID NO: 430, SEQ ID NO: 431, SEQ ID NO: 432, SEQ ID NO: 433, SEQ ID NO: 434, SEQ ID NO: 435, SEQ ID NO: 436, SEQ ID NO: 437, SEQ ID NO: 438, SEQ ID NO: 439, SEQ ID NO: 440, SEQ ID NO: 441, SEQ ID NO: 442, SEQ ID NO: 443, SEQ ID NO: 444, SEQ ID NO: 445, or SEQ ID NO: 446.

[0539] In some examples of any of the ABPCs described herein, the first antigen-binding domain includes a light chain variable domain comprising SEQ ID NO: 468, and a heavy chain variable domain comprising SEQ ID NO: 401, SEQ ID NO: 403, SEQ ID NO: 404, SEQ ID NO: 405, SEQ ID NO: 406, SEQ ID NO: 407, SEQ ID NO: 408, SEQ ID NO: 409, SEQ ID NO: 410, SEQ ID NO: 411, SEQ ID NO: 412, SEQ ID NO: 413, SEQ ID NO: 414, SEQ ID NO: 415, SEQ ID NO: 416, SEQ ID NO: 417, SEQ ID NO: 418, SEQ ID NO: 419, SEQ ID NO: 420, SEQ ID NO: 421, SEQ ID NO: 422, SEQ ID NO: 423, SEQ ID NO: 424, SEQ ID NO: 425, SEQ ID NO: 426, SEQ ID NO: 427, SEQ ID NO: 428, SEQ ID NO: 429, SEQ ID NO: 430, SEQ ID NO: 431, SEQ ID NO: 432, SEQ ID NO: 433, SEQ ID NO: 434, SEQ ID NO: 435, SEQ ID NO: 436, SEQ ID NO: 437, SEQ ID NO: 438, SEQ ID NO: 439, SEQ ID NO: 440, SEQ ID NO: 441, SEQ ID NO: 442, SEQ ID NO: 443, SEQ ID NO: 444, SEQ ID NO: 445, or SEQ ID NO: 446.

[0540] In some examples of any of the ABPCs described herein, the first antigen-binding domain includes a light chain variable domain comprising SEQ ID NO: 469, and a heavy chain variable domain comprising SEQ ID NO: 401, SEQ ID NO: 403, SEQ ID NO: 404, SEQ ID NO: 405, SEQ ID NO: 406, SEQ ID NO: 407, SEQ ID NO: 408, SEQ ID NO: 409, SEQ ID NO: 410, SEQ ID NO: 411, SEQ ID NO: 412, SEQ ID NO: 413, SEQ ID NO: 414, SEQ ID NO: 415, SEQ ID NO: 416, SEQ ID NO: 417, SEQ ID NO: 418, SEQ ID NO: 419, SEQ ID NO: 420, SEQ ID NO: 421, SEQ ID NO: 422, SEQ ID NO: 423, SEQ ID NO: 424, SEQ ID NO: 425, SEQ ID NO: 426, SEQ ID NO: 427, SEQ ID NO: 428, SEQ ID NO: 429, SEQ ID NO: 430, SEQ ID NO: 431, SEQ ID NO: 432, SEQ ID NO: 433, SEQ ID NO: 434, SEQ ID NO: 435, SEQ ID NO: 436, SEQ ID NO: 437, SEQ ID NO: 438, SEQ ID NO: 439, SEQ ID NO: 440, SEQ ID NO: 441, SEQ ID NO: 442, SEQ ID NO: 443, SEQ ID NO: 444, SEQ ID NO: 445, or SEQ ID NO: 446.

[0541] In some examples of any of the ABPCs described herein, the first antigen-binding domain includes a heavy chain variable domain of SC16.34 with one or more (e.g., one, two, three, four, five, six, seven, eight, nine, ten, eleven, twelve, thirteen, fourteen, fifteen, sixteen, seventeen, eighteen, nineteen, or twenty) amino acids substituted with a histidine. In some examples of any of the ABPCs described herein, the first antigen-binding domain includes a light chain variable domain of SC16.34 with one or more (e.g., one, two, three, four, five, six, seven, eight, nine, ten, eleven, twelve, thirteen, fourteen, fifteen, sixteen, seventeen, eighteen, nineteen, or twenty) amino acids substituted with a histidine. In some examples of any of the ABPCs described herein, the first antigen-binding domain includes a heavy chain variable domain of SC16.34 with one or more (e.g., one, two, three, four, five, six, seven, eight, nine, ten, eleven, twelve, thirteen, fourteen, fifteen, sixteen, seventeen, eighteen, nineteen, or twenty) amino acids substituted with a histidine; and a light chain variable domain of SC16.34 with one or more (e.g., one, two, three, four, five, six, seven, eight, nine, ten, eleven, twelve, thirteen, fourteen, fifteen, sixteen, seventeen, eighteen, nineteen, or twenty) amino acids substituted with a histidine. In some examples of any of the ABPCs described herein, the heavy chain variable domain of SC16.34 comprises SEQ ID NO: 470. In some examples of any of the ABPCs described herein, the light chain variable domain of SC16.34 comprises SEQ ID NO: 471.

[0542] In some examples of any of the ABPCs described herein, the first antigen-binding domain comprises a heavy chain variable domain comprising a CDR1, a CDR2, and a CDR3 of SEQ ID NO: 646, SEQ ID NO: 647, and SEQ ID NO: 648, respectively, with collectively a total of one or more (e.g., one, two, three, four, five, six, seven, eight, nine, or ten) amino acid positions in SEQ ID NOs: 646-648 substituted with a histidine. In some examples of any of the ABPCs described herein, the first antigen-binding domain comprises a light chain variable domain comprising a CDR1, a CDR2, and a CDR3 of SEQ ID NO: 649 SEQ ID NO: 650, and SEQ ID NO: 651, respectively, with collectively a total of one or more (e.g., one, two, three, four, five, six, seven, eight, nine, or ten) amino acid positions in SEQ ID NOs: 649-651 substituted with a histidine. In some examples of any of the ABPCs described herein, the first antigen-binding domain includes: a heavy chain variable domain comprising a CDR1, a CDR2, and a CDR3 of SEQ ID NO: 646, SEQ ID NO: 647, and SEQ ID NO: 648, respectively, with collectively a total of one or more (e.g., one, two, three, four, five, six, seven, eight, nine, or ten) amino acid positions in SEQ ID NOs: 646-648 substituted with a histidine; and a light chain variable domain comprising a CDR1, a CDR2, and a CDR3 of SEQ ID NO: 649, SEQ ID NO: 650, and SEQ ID NO: 651, respectively, with collectively a total of one or more (e.g., one, two, three, four, five, six, seven, eight, nine, or ten) amino acid positions in SEQ ID NOs: 649-651 substituted with a histidine.

[0543] In some examples of any of the ABPCs described herein, the first antigen-binding domain includes a heavy chain variable domain that is at least 90% (e.g., at least 92%, at least 94%, at least 96%, at least 98%, at least 99%, or 100%) identical to SEQ ID NO: 470, where the heavy chain variable domain includes a histidine at one or more (e.g., one, two, three, four, five, six, seven, eight, nine, ten, eleven, twelve, thirteen, fourteen, fifteen, sixteen, seventeen, eighteen, nineteen, or twenty) amino acid positions in SEQ ID NO: 470 selected from the group consisting of: 24, 27, 29, 32, 34, 35, 50, 51, 53, 54, 56, 58, 59, 60, 63, 98, 101, 103, 105, 106, and 107. In some examples of any of the ABPCs described herein, the first antigen-binding domain includes a light chain variable domain that is at least 90% (e.g., at least 92%, at least 94%, at least 96%, at least 98%, at least 99%, or 100%) identical to SEQ ID NO: 471, where the light chain variable domain includes a histidine at one or more (e.g., one, two, three, four, five, six, seven, eight, nine, ten, eleven, twelve, thirteen, fourteen, fifteen, sixteen, seventeen, eighteen, nineteen, or twenty) amino acid positions in SEQ ID NO: 471 selected from the group consisting of: 29, 32, 33, 34, 50, 51, 53, 55, 89, 92, 94, 96 and 97. In some examples of any of the ABPCs described herein the first antigen-binding domain includes: a heavy chain variable domain that is at least 90% (e.g., at least 92%, at least 94%, at least 96%, at least 98%, at least 99%, or 100%) identical to SEQ ID NO: 470, where the heavy chain variable domain includes a histidine at one or more (e.g., one, two, three, four, five, six, seven, eight, nine, ten, eleven, twelve, thirteen, fourteen, fifteen, sixteen, seventeen, eighteen, nineteen, or twenty) amino acid positions in SEQ ID NO: 470 selected from the group consisting of: 24, 27, 29, 32, 34, 35, 50, 51, 53, 54, 56, 58, 59, 60, 63, 98, 101, 103, 105, 106, and 107 and a light chain variable domain that is at least 90% (e.g., at least 92%, at least 94%, at least 96%, at least 98%, at least 99%, or 100%) identical to SEQ ID NO: 471, where the light chain variable domain includes a histidine at one or more (e.g., one, two, three, four, five, six, seven, eight, nine, ten, eleven, twelve, thirteen, fourteen, fifteen, sixteen, seventeen, eighteen, nineteen, or twenty) amino acid positions in SEQ ID NO: 471 selected from the group consisting of: 29, 32, 33, 34, 50, 51, 53, 55, 89, 92, 94, 96 and 97.

[0544] In some examples of any of the ABPCs described herein, a heavy chain variable domain includes a heavy chain variable domain that is at least 90% (e.g., at least 92%, at least 94%, at least 96%, at least 98%, at least 99%, or 100%) identical to SEQ ID NO: 470, where the heavy chain variable domain includes a histidine at any of the specific combinations of one or more amino acid positions in SEQ ID NO: 470 listed in Table 11.

TABLE 11
Exemplary Combinations of Amino Acid Positions in SEQ
ID NO: 470 that can be substituted with histidine

24 + 27, 24 + 29, 24 + 32, 24 + 34, 24 + 35, 24 + 50, 24 + 51, 24 + 53, 24 + 54, 24 + 56, 24 +
58, 24 + 59, 24 + 60, 24 + 63, 24 + 98, 24 + 101, 24 + 103, 24 + 105, 24 + 106, 24 + 107, 27 +
29, 27 + 32, 27 + 34, 27 + 35, 27 + 50, 27 + 51, 27 + 53, 27 + 54, 27 + 56, 27 + 58, 27 + 59,
27 + 60, 27 + 63, 27 + 98, 27 + 101, 27 + 103, 27 + 105, 27 + 106, 27 + 107, 29 + 32, 29 + 34,
29 + 35, 29 + 50, 29 + 51, 29 + 53, 29 + 54, 29 + 56, 29 + 58, 29 + 59, 29 + 60, 29 + 63, 29 +
98, 29 + 101, 29 + 103, 29 + 105, 29 + 106, 29 + 107, 32 + 34, 32 + 35, 32 + 50, 32 + 51, 32 +
53, 32 + 54, 32 + 56, 32 + 58, 32 + 59, 32 + 60, 32 + 63, 32 + 98, 32 + 101, 32 + 103, 32 +
105, 32 + 106, 32 + 107, 34 + 35, 34 + 50, 34 + 51, 34 + 53, 34 + 54, 34 + 56, 34 + 58, 34 +
59, 34 + 60, 34 + 63, 34 + 98, 34 + 101, 34 + 103, 34 + 105, 34 + 106, 34 + 107, 35 + 50, 35 +
51, 35 + 53, 35 + 54, 35 + 56, 35 + 58, 35 + 59, 35 + 60, 35 + 63, 35 + 98, 35 + 101, 35 + 103,
35 + 105, 35 + 106, 35 + 107, 50 + 51, 50 + 53, 50 + 54, 50 + 56, 50 + 58, 50 + 59, 50 + 60,
50 + 63, 50 + 98, 50 + 101, 50 + 103, 50 + 105, 50 + 106, 50 + 107, 51 + 53, 51 + 54, 51 + 56,
51 + 58, 51 + 59, 51 + 60, 51 + 63, 51 + 98, 51 + 101, 51 + 103, 51 + 105, 51 + 106, 51 + 107,
53 + 54, 53 + 56, 53 + 58, 53 + 59, 53 + 60, 53 + 63, 53 + 98, 53 + 101, 53 + 103, 53 + 105,
53 + 106, 53 + 107, 54 + 56, 54 + 58, 54 + 59, 54 + 60, 54 + 63, 54 + 98, 54 + 101, 54 + 103,
54 + 105, 54 + 106, 54 + 107, 56 + 58, 56 + 59, 56 + 60, 56 + 63, 56 + 98, 56 + 101, 56 + 103,
56 + 105, 56 + 106, 56 + 107, 58 + 59, 58 + 60, 58 + 63, 58 + 98, 58 + 101, 58 + 103, 58 +
105, 58 + 106, 58 + 107, 59 + 60, 59 + 63, 59 + 98, 59 + 101, 59 + 103, 59 + 105, 59 + 106,
59 + 107, 60 + 63, 60 + 98, 60 + 101, 60 + 103, 60 + 105, 60 + 106, 60 + 107, 63 + 98, 63 +
101, 63 + 103, 63 + 105, 63 + 106, 63 + 107, 98 + 101, 98 + 103, 98 + 105, 98 + 106, 98 +
107, 101 + 103, 101 + 105, 101 + 106, 101 + 107, 103 + 105, 103 + 106, 103 + 107, 105 +
106, 105 + 107, 106 + 107, 24 + 27 + 29, 24 + 27 + 32, 24 + 27 + 34, 24 + 27 + 35, 24 + 27 +
50, 24 + 27 + 51, 24 + 27 + 53, 24 + 27 + 54, 24 + 27 + 56, 24 + 27 + 58, 24 + 27 + 59, 24 +
27 + 60, 24 + 27 + 63, 24 + 27 + 98, 24 + 27 + 101, 24 + 27 + 103, 24 + 27 + 105, 24 + 27 +
106, 24 + 27 + 107, 24 + 29 + 32, 24 + 29 + 34, 24 + 29 + 35, 24 + 29 + 50, 24 + 29 + 51, 24 +
29 + 53, 24 + 29 + 54, 24 + 29 + 56, 24 + 29 + 58, 24 + 29 + 59, 24 + 29 + 60, 24 + 29 + 63,
24 + 29 + 98, 24 + 29 + 101, 24 + 29 + 103, 24 + 29 + 105, 24 + 29 + 106, 24 + 29 + 107, 24 +
32 + 34, 24 + 32 + 35, 24 + 32 + 50, 24 + 32 + 51, 24 + 32 + 53, 24 + 32 + 54, 24 + 32 + 56,
24 + 32 + 58, 24 + 32 + 59, 24 + 32 + 60, 24 + 32 + 63, 24 + 32 + 98, 24 + 32 + 101, 24 + 32 +
103, 24 + 32 + 105, 24 + 32 + 106, 24 + 32 + 107, 24 + 34 + 35, 24 + 34 + 50, 24 + 34 + 51,
24 + 34 + 53, 24 + 34 + 54, 24 + 34 + 56, 24 + 34 + 58, 24 + 34 + 59, 24 + 34 + 60, 24 + 34 +
63, 24 + 34 + 98, 24 + 34 + 101, 24 + 34 + 103, 24 + 34 + 105, 24 + 34 + 106, 24 + 34 + 107,
24 + 35 + 50, 24 + 35 + 51, 24 + 35 + 53, 24 + 35 + 54, 24 + 35 + 56, 24 + 35 + 58, 24 + 35 +
59, 24 + 35 + 60, 24 + 35 + 63, 24 + 35 + 98, 24 + 35 + 101, 24 + 35 + 103, 24 + 35 + 105, 24 +
35 + 106, 24 + 35 + 107, 24 + 50 + 51, 24 + 50 + 53, 24 + 50 + 54, 24 + 50 + 56, 24 + 50 +
58, 24 + 50 + 59, 24 + 50 + 60, 24 + 50 + 63, 24 + 50 + 98, 24 + 50 + 101, 24 + 50 + 103, 24 +
50 + 105, 24 + 50 + 106, 24 + 50 + 107, 24 + 51 + 53, 24 + 51 + 54, 24 + 51 + 56, 24 + 51 +
58, 24 + 51 + 59, 24 + 51 + 60, 24 + 51 + 63, 24 + 51 + 98, 24 + 51 + 101, 24 + 51 + 103, 24 +
51 + 105, 24 + 51 + 106, 24 + 51 + 107, 24 + 53 + 54, 24 + 53 + 56, 24 + 53 + 58, 24 + 53 +
59, 24 + 53 + 60, 24 + 53 + 63, 24 + 53 + 98, 24 + 53 + 101, 24 + 53 + 103, 24 + 53 + 105, 24 +
53 + 106, 24 + 53 + 107, 24 + 54 + 56, 24 + 54 + 58, 24 + 54 + 59, 24 + 54 + 60, 24 + 54 +
63, 24 + 54 + 98, 24 + 54 + 101, 24 + 54 + 103, 24 + 54 + 105, 24 + 54 + 106, 24 + 54 + 107,
24 + 56 + 58, 24 + 56 + 59, 24 + 56 + 60, 24 + 56 + 63, 24 + 56 + 98, 24 + 56 + 101, 24 + 56 +
103, 24 + 56 + 105, 24 + 56 + 106, 24 + 56 + 107, 24 + 58 + 59, 24 + 58 + 60, 24 + 58 + 63,
24 + 58 + 98, 24 + 58 + 101, 24 + 58 + 103, 24 + 58 + 105, 24 + 58 + 106, 24 + 58 + 107, 24 +
59 + 60, 24 + 59 + 63, 24 + 59 + 98, 24 + 59 + 101, 24 + 59 + 103, 24 + 59 + 105, 24 + 59 +
106, 24 + 59 + 107, 24 + 60 + 63, 24 + 60 + 98, 24 + 60 + 101, 24 + 60 + 103, 24 + 60 + 105,
24 + 60 + 106, 24 + 60 + 107, 24 + 63 + 98, 24 + 63 + 101, 24 + 63 + 103, 24 + 63 + 105, 24 +
63 + 106, 24 + 63 + 107, 24 + 98 + 101, 24 + 98 + 103, 24 + 98 + 105, 24 + 98 + 106, 24 +
98 + 107, 24 + 101 + 103, 24 + 101 + 105, 24 + 101 + 106, 24 + 101 + 107, 24 + 103 + 105,
24 + 103 + 106, 24 + 103 + 107, 24 + 105 + 106, 24 + 105 + 107, 24 + 106 + 107, 27 + 29 +
32, 27 + 29 + 34, 27 + 29 + 35, 27 + 29 + 50, 27 + 29 + 51, 27 + 29 + 53, 27 + 29 + 54, 27 +
29 + 56, 27 + 29 + 58, 27 + 29 + 59, 27 + 29 + 60, 27 + 29 + 63, 27 + 29 + 98, 27 + 29 + 101,
27 + 29 + 103, 27 + 29 + 105, 27 + 29 + 106, 27 + 29 + 107, 27 + 32 + 34, 27 + 32 + 35, 27 +
32 + 50, 27 + 32 + 51, 27 + 32 + 53, 27 + 32 + 54, 27 + 32 + 56, 27 + 32 + 58, 27 + 32 + 59,
27 + 32 + 60, 27 + 32 + 63, 27 + 32 + 98, 27 + 32 + 101, 27 + 32 + 103, 27 + 32 + 105, 27 +
32 + 106, 27 + 32 + 107, 27 + 34 + 35, 27 + 34 + 50, 27 + 34 + 51, 27 + 34 + 53, 27 + 34 +
54, 27 + 34 + 56, 27 + 34 + 58, 27 + 34 + 59, 27 + 34 + 60, 27 + 34 + 63, 27 + 34 + 98, 27 +
34 + 101, 27 + 34 + 103, 27 + 34 + 105, 27 + 34 + 106, 27 + 34 + 107, 27 + 35 + 50, 27 + 35 +
51, 27 + 35 + 53, 27 + 35 + 54, 27 + 35 + 56, 27 + 35 + 58, 27 + 35 + 59, 27 + 35 + 60, 27 +
35 + 63, 27 + 35 + 98, 27 + 35 + 101, 27 + 35 + 103, 27 + 35 + 105, 27 + 35 + 106, 27 + 35 +
107, 27 + 50 + 51, 27 + 50 + 53, 27 + 50 + 54, 27 + 50 + 56, 27 + 50 + 58, 27 + 50 + 59, 27 +
50 + 60, 27 + 50 + 63, 27 + 50 + 98, 27 + 50 + 101, 27 + 50 + 103, 27 + 50 + 105, 27 + 50 +
106, 27 + 50 + 107, 27 + 51 + 53, 27 + 51 + 54, 27 + 51 + 56, 27 + 51 + 58, 27 + 51 + 59, 27 +
51 + 60, 27 + 51 + 63, 27 + 51 + 98, 27 + 51 + 101, 27 + 51 + 103, 27 + 51 + 105, 27 + 51 +
106, 27 + 51 + 107, 27 + 53 + 54, 27 + 53 + 56, 27 + 53 + 58, 27 + 53 + 59, 27 + 53 + 60, 27 +
53 + 63, 27 + 53 + 98, 27 + 53 + 101, 27 + 53 + 103, 27 + 53 + 105, 27 + 53 + 106, 27 + 53 +
107, 27 + 54 + 56, 27 + 54 + 58, 27 + 54 + 59, 27 + 54 + 60, 27 + 54 + 63, 27 + 54 + 98, 27 +
54 + 101, 27 + 54 + 103, 27 + 54 + 105, 27 + 54 + 106, 27 + 54 + 107, 27 + 56 + 58, 27 +
56 + 59, 27 + 56 + 60, 27 + 56 + 63, 27 + 56 + 98, 27 + 56 + 101, 27 + 56 + 103, 27 + 56 +
105, 27 + 56 + 106, 27 + 56 + 107, 27 + 58 + 59, 27 + 58 + 60, 27 + 58 + 63, 27 + 58 + 98, 27 +
58 + 101, 27 + 58 + 103, 27 + 58 + 105, 27 + 58 + 106, 27 + 58 + 107, 27 + 59 + 60, 27 +
59 + 63, 27 + 59 + 98, 27 + 59 + 101, 27 + 59 + 103, 27 + 59 + 105, 27 + 59 + 106, 27 + 59 +
107, 27 + 60 + 63, 27 + 60 + 98, 27 + 60 + 101, 27 + 60 + 103, 27 + 60 + 105, 27 + 60 + 106,
27 + 60 + 107, 27 + 63 + 98, 27 + 63 + 101, 27 + 63 + 103, 27 + 63 + 105, 27 + 63 + 106, 27 +
63 + 107, 27 + 98 + 101, 27 + 98 + 103, 27 + 98 + 105, 27 + 98 + 106, 27 + 98 + 107, 27 +
101 + 103, 27 + 101 + 105, 27 + 101 + 106, 27 + 101 + 107, 27 + 103 + 105, 27 + 103 + 106,
27 + 103 + 107, 27 + 105 + 106, 27 + 105 + 107, 27 + 106 + 107, 29 + 32 + 34, 29 + 32 + 35,
29 + 32 + 50, 29 + 32 + 51, 29 + 32 + 53, 29 + 32 + 54, 29 + 32 + 56, 29 + 32 + 58, 29 + 32 +
59, 29 + 32 + 60, 29 + 32 + 63, 29 + 32 + 98, 29 + 32 + 101, 29 + 32 + 103, 29 + 32 + 105, 29 +
32 + 106, 29 + 32 + 107, 29 + 34 + 35, 29 + 34 + 50, 29 + 34 + 51, 29 + 34 + 53, 29 + 34 +
54, 29 + 34 + 56, 29 + 34 + 58, 29 + 34 + 59, 29 + 34 + 60, 29 + 34 + 63, 29 + 34 + 98, 29 +
34 + 101, 29 + 34 + 103, 29 + 34 + 105, 29 + 34 + 106, 29 + 34 + 107, 29 + 35 + 50, 29 + 35 +
51, 29 + 35 + 53, 29 + 35 + 54, 29 + 35 + 56, 29 + 35 + 58, 29 + 35 + 59, 29 + 35 + 60, 29 +
35 + 63, 29 + 35 + 98, 29 + 35 + 101, 29 + 35 + 103, 29 + 35 + 105, 29 + 35 + 106, 29 + 35 +
107, 29 + 50 + 51, 29 + 50 + 53, 29 + 50 + 54, 29 + 50 + 56, 29 + 50 + 58, 29 + 50 + 59, 29 +
50 + 60, 29 + 50 + 63, 29 + 50 + 98, 29 + 50 + 101, 29 + 50 + 103, 29 + 50 + 105, 29 + 50 +
106, 29 + 50 + 107, 29 + 51 + 53, 29 + 51 + 54, 29 + 51 + 56, 29 + 51 + 58, 29 + 51 + 59, 29 +
51 + 60, 29 + 51 + 63, 29 + 51 + 98, 29 + 51 + 101, 29 + 51 + 103, 29 + 51 + 105, 29 + 51 +
106, 29 + 51 + 107, 29 + 53 + 54, 29 + 53 + 56, 29 + 53 + 58, 29 + 53 + 59, 29 + 53 + 60, 29 +
53 + 63, 29 + 53 + 98, 29 + 53 + 101, 29 + 53 + 103, 29 + 53 + 105, 29 + 53 + 106, 29 + 53 +
107, 29 + 54 + 56, 29 + 54 + 58, 29 + 54 + 59, 29 + 54 + 60, 29 + 54 + 63, 29 + 54 + 98, 29 +
54 + 101, 29 + 54 + 103, 29 + 54 + 105, 29 + 54 + 106, 29 + 54 + 107, 29 + 56 + 58, 29 +
56 + 59, 29 + 56 + 60, 29 + 56 + 63, 29 + 56 + 98, 29 + 56 + 101, 29 + 56 + 103, 29 + 56 +
105, 29 + 56 + 106, 29 + 56 + 107, 29 + 58 + 59, 29 + 58 + 60, 29 + 58 + 63, 29 + 58 + 98, 29 +
58 + 101, 29 + 58 + 103, 29 + 58 + 105, 29 + 58 + 106, 29 + 58 + 107, 29 + 59 + 60, 29 +
59 + 63, 29 + 59 + 98, 29 + 59 + 101, 29 + 59 + 103, 29 + 59 + 105, 29 + 59 + 106, 29 + 59 +
107, 29 + 60 + 63, 29 + 60 + 98, 29 + 60 + 101, 29 + 60 + 103, 29 + 60 + 105, 29 + 60 + 106,
29 + 60 + 107, 29 + 63 + 98, 29 + 63 + 101, 29 + 63 + 103, 29 + 63 + 105, 29 + 63 + 106, 29 +
63 + 107, 29 + 98 + 101, 29 + 98 + 103, 29 + 98 + 105, 29 + 98 + 106, 29 + 98 + 107, 29 +
101 + 103, 29 + 101 + 105, 29 + 101 + 106, 29 + 101 + 107, 29 + 103 + 105, 29 + 103 + 106,
29 + 103 + 107, 29 + 105 + 106, 29 + 105 + 107, 29 + 106 + 107, 32 + 34 + 35, 32 + 34 + 50,
32 + 34 + 51, 32 + 34 + 53, 32 + 34 + 54, 32 + 34 + 56, 32 + 34 + 58, 32 + 34 + 59, 32 + 34 +
60, 32 + 34 + 63, 32 + 34 + 98, 32 + 34 + 101, 32 + 34 + 103, 32 + 34 + 105, 32 + 34 + 106,
32 + 34 + 107, 32 + 35 + 50, 32 + 35 + 51, 32 + 35 + 53, 32 + 35 + 54, 32 + 35 + 56, 32 + 35 +
58, 32 + 35 + 59, 32 + 35 + 60, 32 + 35 + 63, 32 + 35 + 98, 32 + 35 + 101, 32 + 35 + 103,
32 + 35 + 105, 32 + 35 + 106, 32 + 35 + 107, 32 + 50 + 51, 32 + 50 + 53, 32 + 50 + 54, 32 +
50 + 56, 32 + 50 + 58, 32 + 50 + 59, 32 + 50 + 60, 32 + 50 + 63, 32 + 50 + 98, 32 + 50 + 101,
32 + 50 + 103, 32 + 50 + 105, 32 + 50 + 106, 32 + 50 + 107, 32 + 51 + 53, 32 + 51 + 54, 32 +
51 + 56, 32 + 51 + 58, 32 + 51 + 59, 32 + 51 + 60, 32 + 51 + 63, 32 + 51 + 98, 32 + 51 + 101,
32 + 51 + 103, 32 + 51 + 105, 32 + 51 + 106, 32 + 51 + 107, 32 + 53 + 54, 32 + 53 + 56, 32 +
53 + 58, 32 + 53 + 59, 32 + 53 + 60, 32 + 53 + 63, 32 + 53 + 98, 32 + 53 + 101, 32 + 53 +
103, 32 + 53 + 105, 32 + 53 + 106, 32 + 53 + 107, 32 + 54 + 56, 32 + 54 + 58, 32 + 54 + 59,
32 + 54 + 60, 32 + 54 + 63, 32 + 54 + 98, 32 + 54 + 101, 32 + 54 + 103, 32 + 54 + 105, 32 +
54 + 106, 32 + 54 + 107, 32 + 56 + 58, 32 + 56 + 59, 32 + 56 + 60, 32 + 56 + 63, 32 + 56 +
98, 32 + 56 + 101, 32 + 56 + 103, 32 + 56 + 105, 32 + 56 + 106, 32 + 56 + 107, 32 + 58 + 59,
32 + 58 + 60, 32 + 58 + 63, 32 + 58 + 98, 32 + 58 + 101, 32 + 58 + 103, 32 + 58 + 105, 32 +
58 + 106, 32 + 58 + 107, 32 + 59 + 60, 32 + 59 + 63, 32 + 59 + 98, 32 + 59 + 101, 32 + 59 +
103, 32 + 59 + 105, 32 + 59 + 106, 32 + 59 + 107, 32 + 60 + 63, 32 + 60 + 98, 32 + 60 + 101,
32 + 60 + 103, 32 + 60 + 105, 32 + 60 + 106, 32 + 60 + 107, 32 + 63 + 98, 32 + 63 + 101, 32 +
63 + 103, 32 + 63 + 105, 32 + 63 + 106, 32 + 63 + 107, 32 + 98 + 101, 32 + 98 + 103, 32 +
98 + 105, 32 + 98 + 106, 32 + 98 + 107, 32 + 101 + 103, 32 + 101 + 105, 32 + 101 + 106, 32 +
101 + 107, 32 + 103 + 105, 32 + 103 + 106, 32 + 103 + 107, 32 + 105 + 106, 32 + 105 + 107,
32 + 106 + 107, 34 + 35 + 50, 34 + 35 + 51, 34 + 35 + 53, 34 + 35 + 54, 34 + 35 + 56, 34 + 35 +
58, 34 + 35 + 59, 34 + 35 + 60, 34 + 35 + 63, 34 + 35 + 98, 34 + 35 + 101, 34 + 35 + 103,
34 + 35 + 105, 34 + 35 + 106, 34 + 35 + 107, 34 + 50 + 51, 34 + 50 + 53, 34 + 50 + 54, 34 +
50 + 56, 34 + 50 + 58, 34 + 50 + 59, 34 + 50 + 60, 34 + 50 + 63, 34 + 50 + 98, 34 + 50 + 101,
34 + 50 + 103, 34 + 50 + 105, 34 + 50 + 106, 34 + 50 + 107, 34 + 51 + 53, 34 + 51 + 54, 34 +
51 + 56, 34 + 51 + 58, 34 + 51 + 59, 34 + 51 + 60, 34 + 51 + 63, 34 + 51 + 98, 34 + 51 + 101,
34 + 51 + 103, 34 + 51 + 105, 34 + 51 + 106, 34 + 51 + 107, 34 + 53 + 54, 34 + 53 + 56, 34 +
53 + 58, 34 + 53 + 59, 34 + 53 + 60, 34 + 53 + 63, 34 + 53 + 98, 34 + 53 + 101, 34 + 53 +
103, 34 + 53 + 105, 34 + 53 + 106, 34 + 53 + 107, 34 + 54 + 56, 34 + 54 + 58, 34 + 54 + 59,
34 + 54 + 60, 34 + 54 + 63, 34 + 54 + 98, 34 + 54 + 101, 34 + 54 + 103, 34 + 54 + 105, 34 +
54 + 106, 34 + 54 + 107, 34 + 56 + 58, 34 + 56 + 59, 34 + 56 + 60, 34 + 56 + 63, 34 + 56 +
98, 34 + 56 + 101, 34 + 56 + 103, 34 + 56 + 105, 34 + 56 + 106, 34 + 56 + 107, 34 + 58 + 59,
34 + 58 + 60, 34 + 58 + 63, 34 + 58 + 98, 34 + 58 + 101, 34 + 58 + 103, 34 + 58 + 105, 34 +
58 + 106, 34 + 58 + 107, 34 + 59 + 60, 34 + 59 + 63, 34 + 59 + 98, 34 + 59 + 101, 34 + 59 +
103, 34 + 59 + 105, 34 + 59 + 106, 34 + 59 + 107, 34 + 60 + 63, 34 + 60 + 98, 34 + 60 + 101,
34 + 60 + 103, 34 + 60 + 105, 34 + 60 + 106, 34 + 60 + 107, 34 + 63 + 98, 34 + 63 + 101, 34 +
63 + 103, 34 + 63 + 105, 34 + 63 + 106, 34 + 63 + 107, 34 + 98 + 101, 34 + 98 + 103, 34 +
98 + 105, 34 + 98 + 106, 34 + 98 + 107, 34 + 101 + 103, 34 + 101 + 105, 34 + 101 + 106, 34 +
101 + 107, 34 + 103 + 105, 34 + 103 + 106, 34 + 103 + 107, 34 + 105 + 106, 34 + 105 + 107,
34 + 106 + 107, 35 + 50 + 51, 35 + 50 + 53, 35 + 50 + 54, 35 + 50 + 56, 35 + 50 + 58, 35 + 50 +
59, 35 + 50 + 60, 35 + 50 + 63, 35 + 50 + 98, 35 + 50 + 101, 35 + 50 + 103, 35 + 50 + 105,
35 + 50 + 106, 35 + 50 + 107, 35 + 51 + 53, 35 + 51 + 54, 35 + 51 + 56, 35 + 51 + 58, 35 + 51 +
59, 35 + 51 + 60, 35 + 51 + 63, 35 + 51 + 98, 35 + 51 + 101, 35 + 51 + 103, 35 + 51 + 105,
35 + 51 + 106, 35 + 51 + 107, 35 + 53 + 54, 35 + 53 + 56, 35 + 53 + 58, 35 + 53 + 59, 35 + 53 +
60, 35 + 53 + 63, 35 + 53 + 98, 35 + 53 + 101, 35 + 53 + 103, 35 + 53 + 105, 35 + 53 + 106,
35 + 53 + 107, 35 + 54 + 56, 35 + 54 + 58, 35 + 54 + 59, 35 + 54 + 60, 35 + 54 + 63, 35 + 54 +
98, 35 + 54 + 101, 35 + 54 + 103, 35 + 54 + 105, 35 + 54 + 106, 35 + 54 + 107, 35 + 56 +
58, 35 + 56 + 59, 35 + 56 + 60, 35 + 56 + 63, 35 + 56 + 98, 35 + 56 + 101, 35 + 56 + 103, 35 +
56 + 105, 35 + 56 + 106, 35 + 56 + 107, 35 + 58 + 59, 35 + 58 + 60, 35 + 58 + 63, 35 + 58 +
98, 35 + 58 + 101, 35 + 58 + 103, 35 + 58 + 105, 35 + 58 + 106, 35 + 58 + 107, 35 + 59 + 60,
35 + 59 + 63, 35 + 59 + 98, 35 + 59 + 101, 35 + 59 + 103, 35 + 59 + 105, 35 + 59 + 106, 35 +
59 + 107, 35 + 60 + 63, 35 + 60 + 98, 35 + 60 + 101, 35 + 60 + 103, 35 + 60 + 105, 35 + 60 +
106, 35 + 60 + 107, 35 + 63 + 98, 35 + 63 + 101, 35 + 63 + 103, 35 + 63 + 105, 35 + 63 + 106,
35 + 63 + 107, 35 + 98 + 101, 35 + 98 + 103, 35 + 98 + 105, 35 + 98 + 106, 35 + 98 + 107, 35 +
101 + 103, 35 + 101 + 105, 35 + 101 + 106, 35 + 101 + 107, 35 + 103 + 105, 35 + 103 +
106, 35 + 103 + 107, 35 + 105 + 106, 35 + 105 + 107, 35 + 106 + 107, 50 + 51 + 53, 50 + 51 +
54, 50 + 51 + 56, 50 + 51 + 58, 50 + 51 + 59, 50 + 51 + 60, 50 + 51 + 63, 50 + 51 + 98, 50 +
51 + 101, 50 + 51 + 103, 50 + 51 + 105, 50 + 51 + 106, 50 + 51 + 107, 50 + 53 + 54, 50 + 53 +
56, 50 + 53 + 58, 50 + 53 + 59, 50 + 53 + 60, 50 + 53 + 63, 50 + 53 + 98, 50 + 53 + 101, 50 +
53 + 103, 50 + 53 + 105, 50 + 53 + 106, 50 + 53 + 107, 50 + 54 + 56, 50 + 54 + 58, 50 + 54 +
59, 50 + 54 + 60, 50 + 54 + 63, 50 + 54 + 98, 50 + 54 + 101, 50 + 54 + 103, 50 + 54 + 105,
50 + 54 + 106, 50 + 54 + 107, 50 + 56 + 58, 50 + 56 + 59, 50 + 56 + 60, 50 + 56 + 63, 50 + 56 +
98, 50 + 56 + 101, 50 + 56 + 103, 50 + 56 + 105, 50 + 56 + 106, 50 + 56 + 107, 50 + 58 +
59, 50 + 58 + 60, 50 + 58 + 63, 50 + 58 + 98, 50 + 58 + 101, 50 + 58 + 103, 50 + 58 + 105, 50 +
58 + 106, 50 + 58 + 107, 50 + 59 + 60, 50 + 59 + 63, 50 + 59 + 98, 50 + 59 + 101, 50 + 59 +
103, 50 + 59 + 105, 50 + 59 + 106, 50 + 59 + 107, 50 + 60 + 63, 50 + 60 + 98, 50 + 60 + 101,
50 + 60 + 103, 50 + 60 + 105, 50 + 60 + 106, 50 + 60 + 107, 50 + 63 + 98, 50 + 63 + 101, 50 +
63 + 103, 50 + 63 + 105, 50 + 63 + 106, 50 + 63 + 107, 50 + 98 + 101, 50 + 98 + 103, 50 +
98 + 105, 50 + 98 + 106, 50 + 98 + 107, 50 + 101 + 103, 50 + 101 + 105, 50 + 101 + 106, 50 +
101 + 107, 50 + 103 + 105, 50 + 103 + 106, 50 + 103 + 107, 50 + 105 + 106, 50 + 105 + 107,
50 + 106 + 107, 51 + 53 + 54, 51 + 53 + 56, 51 + 53 + 58, 51 + 53 + 59, 51 + 53 + 60, 51 + 53 +
63, 51 + 53 + 98, 51 + 53 + 101, 51 + 53 + 103, 51 + 53 + 105, 51 + 53 + 106, 51 + 53 +
107, 51 + 54 + 56, 51 + 54 + 58, 51 + 54 + 59, 51 + 54 + 60, 51 + 54 + 63, 51 + 54 + 98, 51 +
54 + 101, 51 + 54 + 103, 51 + 54 + 105, 51 + 54 + 106, 51 + 54 + 107, 51 + 56 + 58, 51 + 56 +
59, 51 + 56 + 60, 51 + 56 + 63, 51 + 56 + 98, 51 + 56 + 101, 51 + 56 + 103, 51 + 56 + 105,
51 + 56 + 106, 51 + 56 + 107, 51 + 58 + 59, 51 + 58 + 60, 51 + 58 + 63, 51 + 58 + 98, 51 + 58 +
101, 51 + 58 + 103, 51 + 58 + 105, 51 + 58 + 106, 51 + 58 + 107, 51 + 59 + 60, 51 + 59 +
63, 51 + 59 + 98, 51 + 59 + 101, 51 + 59 + 103, 51 + 59 + 105, 51 + 59 + 106, 51 + 59 + 107,
51 + 60 + 63, 51 + 60 + 98, 51 + 60 + 101, 51 + 60 + 103, 51 + 60 + 105, 51 + 60 + 106, 51 +
60 + 107, 51 + 63 + 98, 51 + 63 + 101, 51 + 63 + 103, 51 + 63 + 105, 51 + 63 + 106, 51 + 63 +
107, 51 + 98 + 101, 51 + 98 + 103, 51 + 98 + 105, 51 + 98 + 106, 51 + 98 + 107, 51 + 101 +
103, 51 + 101 + 105, 51 + 101 + 106, 51 + 101 + 107, 51 + 103 + 105, 51 + 103 + 106, 51 +
103 + 107, 51 + 105 + 106, 51 + 105 + 107, 51 + 106 + 107, 53 + 54 + 56, 53 + 54 + 58, 53 +
54 + 59, 53 + 54 + 60, 53 + 54 + 63, 53 + 54 + 98, 53 + 54 + 101, 53 + 54 + 103, 53 + 54 +
105, 53 + 54 + 106, 53 + 54 + 107, 53 + 56 + 58, 53 + 56 + 59, 53 + 56 + 60, 53 + 56 + 63, 53 +
56 + 98, 53 + 56 + 101, 53 + 56 + 103, 53 + 56 + 105, 53 + 56 + 106, 53 + 56 + 107, 53 +
58 + 59, 53 + 58 + 60, 53 + 58 + 63, 53 + 58 + 98, 53 + 58 + 101, 53 + 58 + 103, 53 + 58 +
105, 53 + 58 + 106, 53 + 58 + 107, 53 + 59 + 60, 53 + 59 + 63, 53 + 59 + 98, 53 + 59 + 101,
53 + 59 + 103, 53 + 59 + 105, 53 + 59 + 106, 53 + 59 + 107, 53 + 60 + 63, 53 + 60 + 98, 53 +
60 + 101, 53 + 60 + 103, 53 + 60 + 105, 53 + 60 + 106, 53 + 60 + 107, 53 + 63 + 98, 53 + 63 +
101, 53 + 63 + 103, 53 + 63 + 105, 53 + 63 + 106, 53 + 63 + 107, 53 + 98 + 101, 53 + 98 +
103, 53 + 98 + 105, 53 + 98 + 106, 53 + 98 + 107, 53 + 101 + 103, 53 + 101 + 105, 53 + 101 +
106, 53 + 101 + 107, 53 + 103 + 105, 53 + 103 + 106, 53 + 103 + 107, 53 + 105 + 106, 53 +
105 + 107, 53 + 106 + 107, 54 + 56 + 58, 54 + 56 + 59, 54 + 56 + 60, 54 + 56 + 63, 54 + 56 +
98, 54 + 56 + 101, 54 + 56 + 103, 54 + 56 + 105, 54 + 56 + 106, 54 + 56 + 107, 54 + 58 + 59,
54 + 58 + 60, 54 + 58 + 63, 54 + 58 + 98, 54 + 58 + 101, 54 + 58 + 103, 54 + 58 + 105, 54 +
58 + 106, 54 + 58 + 107, 54 + 59 + 60, 54 + 59 + 63, 54 + 59 + 98, 54 + 59 + 101, 54 + 59 +
103, 54 + 59 + 105, 54 + 59 + 106, 54 + 59 + 107, 54 + 60 + 63, 54 + 60 + 98, 54 + 60 + 101,
54 + 60 + 103, 54 + 60 + 105, 54 + 60 + 106, 54 + 60 + 107, 54 + 63 + 98, 54 + 63 + 101, 54 +
63 + 103, 54 + 63 + 105, 54 + 63 + 106, 54 + 63 + 107, 54 + 98 + 101, 54 + 98 + 103, 54 +
98 + 105, 54 + 98 + 106, 54 + 98 + 107, 54 + 101 + 103, 54 + 101 + 105, 54 + 101 + 106, 54 +
101 + 107, 54 + 103 + 105, 54 + 103 + 106, 54 + 103 + 107, 54 + 105 + 106, 54 + 105 + 107,
54 + 106 + 107, 56 + 58 + 59, 56 + 58 + 60, 56 + 58 + 63, 56 + 58 + 98, 56 + 58 + 101, 56 +
58 + 103, 56 + 58 + 105, 56 + 58 + 106, 56 + 58 + 107, 56 + 59 + 60, 56 + 59 + 63, 56 + 59 +
98, 56 + 59 + 101, 56 + 59 + 103, 56 + 59 + 105, 56 + 59 + 106, 56 + 59 + 107, 56 + 60 + 63,
56 + 60 + 98, 56 + 60 + 101, 56 + 60 + 103, 56 + 60 + 105, 56 + 60 + 106, 56 + 60 + 107, 56 +
63 + 98, 56 + 63 + 101, 56 + 63 + 103, 56 + 63 + 105, 56 + 63 + 106, 56 + 63 + 107, 56 +
98 + 101, 56 + 98 + 103, 56 + 98 + 105, 56 + 98 + 106, 56 + 98 + 107, 56 + 101 + 103, 56 +
101 + 105, 56 + 101 + 106, 56 + 101 + 107, 56 + 103 + 105, 56 + 103 + 106, 56 + 103 + 107,
56 + 105 + 106, 56 + 105 + 107, 56 + 106 + 107, 58 + 59 + 60, 58 + 59 + 63, 58 + 59 + 98, 58 +
59 + 101, 58 + 59 + 103, 58 + 59 + 105, 58 + 59 + 106, 58 + 59 + 107, 58 + 60 + 63, 58 +
60 + 98, 58 + 60 + 101, 58 + 60 + 103, 58 + 60 + 105, 58 + 60 + 106, 58 + 60 + 107, 58 + 63 +
98, 58 + 63 + 101, 58 + 63 + 103, 58 + 63 + 105, 58 + 63 + 106, 58 + 63 + 107, 58 + 98 +
101, 58 + 98 + 103, 58 + 98 + 105, 58 + 98 + 106, 58 + 98 + 107, 58 + 101 + 103, 58 + 101 +
105, 58 + 101 + 106, 58 + 101 + 107, 58 + 103 + 105, 58 + 103 + 106, 58 + 103 + 107, 58 +
105 + 106, 58 + 105 + 107, 58 + 106 + 107, 59 + 60 + 63, 59 + 60 + 98, 59 + 60 + 101, 59 +
60 + 103, 59 + 60 + 105, 59 + 60 + 106, 59 + 60 + 107, 59 + 63 + 98, 59 + 63 + 101, 59 + 63 +
103, 59 + 63 + 105, 59 + 63 + 106, 59 + 63 + 107, 59 + 98 + 101, 59 + 98 + 103, 59 + 98 +
105, 59 + 98 + 106, 59 + 98 + 107, 59 + 101 + 103, 59 + 101 + 105, 59 + 101 + 106, 59 + 101 +
107, 59 + 103 + 105, 59 + 103 + 106, 59 + 103 + 107, 59 + 105 + 106, 59 + 105 + 107, 59 +
106 + 107, 60 + 63 + 98, 60 + 63 + 101, 60 + 63 + 103, 60 + 63 + 105, 60 + 63 + 106, 60 + 63 +
107, 60 + 98 + 101, 60 + 98 + 103, 60 + 98 + 105, 60 + 98 + 106, 60 + 98 + 107, 60 + 101 +
103, 60 + 101 + 105, 60 + 101 + 106, 60 + 101 + 107, 60 + 103 + 105, 60 + 103 + 106, 60 +
103 + 107, 60 + 105 + 106, 60 + 105 + 107, 60 + 106 + 107, 63 + 98 + 101, 63 + 98 + 103, 63 +
98 + 105, 63 + 98 + 106, 63 + 98 + 107, 63 + 101 + 103, 63 + 101 + 105, 63 + 101 + 106, 63 +
101 + 107, 63 + 103 + 105, 63 + 103 + 106, 63 + 103 + 107, 63 + 105 + 106, 63 + 105 +
107, 63 + 106 + 107, 98 + 101 + 103, 98 + 101 + 105, 98 + 101 + 106, 98 + 101 + 107, 98 +
103 + 105, 98 + 103 + 106, 98 + 103 + 107, 98 + 105 + 106, 98 + 105 + 107, 98 + 106 + 107,
101 + 103 + 105, 101 + 103 + 106, 101 + 103 + 107, 101 + 105 + 106, 101 + 105 + 107, 101 +
106 + 107, 103 + 105 + 106, 103 + 105 + 107, 103 + 106 + 107, 105 + 106 + 107

[0545] In some examples of any of the ABPCs described herein, a light chain variable domain includes a light chain variable domain that is at least 90% (e.g., at least 92%, at least 94%, at least 96%, at least 98%, at least 99%, or 100%) identical to SEQ ID NO: 471, where the light chain variable domain includes a histidine at any of the specific combinations of one or more amino acid positions in SEQ ID NO: 471 listed in Table 12.

TABLE 12
Exemplary Combinations of Amino Acid Positions in SEQ
ID NO: 471 that can be substituted with histidine

29 + 32, 29 + 33, 29 + 34, 29 + 50, 29 + 51, 29 + 53, 29 + 55, 29 + 89, 29 + 92, 29 + 94, 29 +
96, 29 + 97, 32 + 33, 32 + 34, 32 + 50, 32 + 51, 32 + 53, 32 + 55, 32 + 89, 32 + 92, 32 + 94,
32 + 96, 32 + 97, 33 + 34, 33 + 50, 33 + 51, 33 + 53, 33 + 55, 33 + 89, 33 + 92, 33 + 94, 33 +
96, 33 + 97, 34 + 50, 34 + 51, 34 + 53, 34 + 55, 34 + 89, 34 + 92, 34 + 94, 34 + 96, 34 + 97,
50 + 51, 50 + 53, 50 + 55, 50 + 89, 50 + 92, 50 + 94, 50 + 96, 50 + 97, 51 + 53, 51 + 55, 51 +
89, 51 + 92, 51 + 94, 51 + 96, 51 + 97, 53 + 55, 53 + 89, 53 + 92, 53 + 94, 53 + 96, 53 + 97,
55 + 89, 55 + 92, 55 + 94, 55 + 96, 55 + 97, 89 + 92, 89 + 94, 89 + 96, 89 + 97, 92 + 94, 92 +
96, 92 + 97, 94 + 96, 94 + 97, 96 + 97, 29 + 32 + 33, 29 + 32 + 34, 29 + 32 + 50, 29 + 32 +
51, 29 + 32 + 53, 29 + 32 + 55, 29 + 32 + 89, 29 + 32 + 92, 29 + 32 + 94, 29 + 32 + 96, 29 +
32 + 97, 29 + 33 + 34, 29 + 33 + 50, 29 + 33 + 51, 29 + 33 + 53, 29 + 33 + 55, 29 + 33 +
89, 29 + 33 + 92, 29 + 33 + 94, 29 + 33 + 96, 29 + 33 + 97, 29 + 34 + 50, 29 + 34 + 51, 29 +
34 + 53, 29 + 34 + 55, 29 + 34 + 89, 29 + 34 + 92, 29 + 34 + 94, 29 + 34 + 96, 29 + 34 +
97, 29 + 50 + 51, 29 + 50 + 53, 29 + 50 + 55, 29 + 50 + 89, 29 + 50 + 92, 29 + 50 + 94, 29 +
50 + 96, 29 + 50 + 97, 29 + 51 + 53, 29 + 51 + 55, 29 + 51 + 89, 29 + 51 + 92, 29 + 51 +
94, 29 + 51 + 96, 29 + 51 + 97, 29 + 53 + 55, 29 + 53 + 89, 29 + 53 + 92, 29 + 53 + 94, 29 +
53 + 96, 29 + 53 + 97, 29 + 55 + 89, 29 + 55 + 92, 29 + 55 + 94, 29 + 55 + 96, 29 + 55 +
97, 29 + 89 + 92, 29 + 89 + 94, 29 + 89 + 96, 29 + 89 + 97, 29 + 92 + 94, 29 + 92 + 96, 29 +
92 + 97, 29 + 94 + 96, 29 + 94 + 97, 29 + 96 + 97, 32 + 33 + 34, 32 + 33 + 50, 32 + 33 +
51, 32 + 33 + 53, 32 + 33 + 55, 32 + 33 + 89, 32 + 33 + 92, 32 + 33 + 94, 32 + 33 + 96, 32 +
33 + 97, 32 + 34 + 50, 32 + 34 + 51, 32 + 34 + 53, 32 + 34 + 55, 32 + 34 + 89, 32 + 34 +
92, 32 + 34 + 94, 32 + 34 + 96, 32 + 34 + 97, 32 + 50 + 51, 32 + 50 + 53, 32 + 50 + 55, 32 +
50 + 89, 32 + 50 + 92, 32 + 50 + 94, 32 + 50 + 96, 32 + 50 + 97, 32 + 51 + 53, 32 + 51 +
55, 32 + 51 + 89, 32 + 51 + 92, 32 + 51 + 94, 32 + 51 + 96, 32 + 51 + 97, 32 + 53 + 55, 32 +
53 + 89, 32 + 53 + 92, 32 + 53 + 94, 32 + 53 + 96, 32 + 53 + 97, 32 + 55 + 89, 32 + 55 +
92, 32 + 55 + 94, 32 + 55 + 96, 32 + 55 + 97, 32 + 89 + 92, 32 + 89 + 94, 32 + 89 + 96, 32 +
89 + 97, 32 + 92 + 94, 32 + 92 + 96, 32 + 92 + 97, 32 + 94 + 96, 32 + 94 + 97, 32 + 96 +
97, 33 + 34 + 50, 33 + 34 + 51, 33 + 34 + 53, 33 + 34 + 55, 33 + 34 + 89, 33 + 34 + 92, 33 +
34 + 94, 33 + 34 + 96, 33 + 34 + 97, 33 + 50 + 51, 33 + 50 + 53, 33 + 50 + 55, 33 + 50 +
89, 33 + 50 + 92, 33 + 50 + 94, 33 + 50 + 96, 33 + 50 + 97, 33 + 51 + 53, 33 + 51 + 55, 33 +
51 + 89, 33 + 51 + 92, 33 + 51 + 94, 33 + 51 + 96, 33 + 51 + 97, 33 + 53 + 55, 33 + 53 +
89, 33 + 53 + 92, 33 + 53 + 94, 33 + 53 + 96, 33 + 53 + 97, 33 + 55 + 89, 33 + 55 + 92, 33 +
55 + 94, 33 + 55 + 96, 33 + 55 + 97, 33 + 89 + 92, 33 + 89 + 94, 33 + 89 + 96, 33 + 89 +
97, 33 + 92 + 94, 33 + 92 + 96, 33 + 92 + 97, 33 + 94 + 96, 33 + 94 + 97, 33 + 96 + 97, 34 +
50 + 51, 34 + 50 + 53, 34 + 50 + 55, 34 + 50 + 89, 34 + 50 + 92, 34 + 50 + 94, 34 + 50 +
96, 34 + 50 + 97, 34 + 51 + 53, 34 + 51 + 55, 34 + 51 + 89, 34 + 51 + 92, 34 + 51 + 94, 34 +
51 + 96, 34 + 51 + 97, 34 + 53 + 55, 34 + 53 + 89, 34 + 53 + 92, 34 + 53 + 94, 34 + 53 +
96, 34 + 53 + 97, 34 + 55 + 89, 34 + 55 + 92, 34 + 55 + 94, 34 + 55 + 96, 34 + 55 + 97, 34 +
89 + 92, 34 + 89 + 94, 34 + 89 + 96, 34 + 89 + 97, 34 + 92 + 94, 34 + 92 + 96, 34 + 92 +
97, 34 + 94 + 96, 34 + 94 + 97, 34 + 96 + 97, 50 + 51 + 53, 50 + 51 + 55, 50 + 51 + 89, 50 +
51 + 92, 50 + 51 + 94, 50 + 51 + 96, 50 + 51 + 97, 50 + 53 + 55, 50 + 53 + 89, 50 + 53 +
92, 50 + 53 + 94, 50 + 53 + 96, 50 + 53 + 97, 50 + 55 + 89, 50 + 55 + 92, 50 + 55 + 94, 50 +
55 + 96, 50 + 55 + 97, 50 + 89 + 92, 50 + 89 + 94, 50 + 89 + 96, 50 + 89 + 97, 50 + 92 +
94, 50 + 92 + 96, 50 + 92 + 97, 50 + 94 + 96, 50 + 94 + 97, 50 + 96 + 97, 51 + 53 + 55, 51 +
53 + 89, 51 + 53 + 92, 51 + 53 + 94, 51 + 53 + 96, 51 + 53 + 97, 51 + 55 + 89, 51 + 55 +
92, 51 + 55 + 94, 51 + 55 + 96, 51 + 55 + 97, 51 + 89 + 92, 51 + 89 + 94, 51 + 89 + 96, 51 +
89 + 97, 51 + 92 + 94, 51 + 92 + 96, 51 + 92 + 97, 51 + 94 + 96, 51 + 94 + 97, 51 + 96 +
97, 53 + 55 + 89, 53 + 55 + 92, 53 + 55 + 94, 53 + 55 + 96, 53 + 55 + 97, 53 + 89 + 92, 53 +
89 + 94, 53 + 89 + 96, 53 + 89 + 97, 53 + 92 + 94, 53 + 92 + 96, 53 + 92 + 97, 53 + 94 +
96, 53 + 94 + 97, 53 + 96 + 97, 55 + 89 + 92, 55 + 89 + 94, 55 + 89 + 96, 55 + 89 + 97, 55 +
92 + 94, 55 + 92 + 96, 55 + 92 + 97, 55 + 94 + 96, 55 + 94 + 97, 55 + 96 + 97, 89 + 92 +
94, 89 + 92 + 96, 89 + 92 + 97, 89 + 94 + 96, 89 + 94 + 97, 89 + 96 + 97, 92 + 94 + 96, 92 +
94 + 97, 92 + 96 + 97, 94 + 96 + 97

[0546] In some examples of any of the ABPCs described herein, the first antigen-binding domain includes a heavy chain variable domain that is at least 90% (e.g., at least 92%, at least 94%, at least 96%, at least 98%, at least 99%, or 100%) identical to SEQ ID NO: 470, where the heavy chain variable domain includes a histidine at any of the specific combinations of one or more amino acid positions in SEQ ID NO: 470 listed in Table 11; and a light chain variable domain that that is at least 90% (e.g., at least 92%, at least 94%, at least 96%, at least 98%, at least 99%, or 100%) identical to SEQ ID NO: 471, where the light chain variable domain includes a histidine at any of the specific combinations of one or more amino acid positions in SEQ ID NO: 471 listed in Table 12.

[0547] In some examples of any of the ABPCs described herein, the first antigen-binding domain comprises a light chain variable domain that is at least 90% identical to SEQ ID NO: 471, wherein the light chain variable domain includes a histidine at position 29 in SEQ ID NO: 471; and a heavy chain variable domain that is at least 90% (e.g., at least 92%, at least 94%, at least 96%, at least 98%, at least 99%, or 100%) identical to SEQ ID NO: 470, where the heavy chain variable domain includes a histidine at any of the specific combinations of one or more amino acid positions in SEQ ID NO: 470 listed in Table 11.

[0548] In some examples of any of the ABPCs described herein, the first antigen-binding domain comprises a light chain variable domain comprising SEQ ID NO: 471, and a heavy chain variable domain that is at least 90% identical (e.g., at least 92%, at least 94%, at least 96%, at least 98%, at least 99%, or 100%) identical to SEQ ID NO: 470, where the heavy chain variable domain includes a histidine at any of the specific combinations of one or more (e.g., two, three, four, five, six, seven, eight, nine, or ten) amino acid positions in SEQ ID NO: 470 listed in Table 11.

[0549] In some examples of any of the ABPCs described herein, the first antigen-binding domain comprises a light chain variable domain that is at least 90% identical to SEQ ID NO: 471, wherein the light chain variable domain includes a histidine at position 32 in SEQ ID NO: 471; and a heavy chain variable domain that is at least 90% (e.g., at least 92%, at least 94%, at least 96%, at least 98%, at least 99%, or 100%) identical to SEQ ID NO: 470, where the heavy chain variable domain includes a histidine at any of the specific combinations of one or more amino acid positions in SEQ ID NO: 470 listed in Table 11.

[0550] In some examples of any of the ABPCs described herein, the first antigen-binding domain comprises a light chain variable domain that is at least 90% identical to SEQ ID NO: 471, wherein the light chain variable domain includes a histidine at position 33 in SEQ ID NO: 471; and a heavy chain variable domain that is at least 90% (e.g., at least 92%, at least 94%, at least 96%, at least 98%, at least 99%, or 100%) identical to SEQ ID NO: 470, where the heavy chain variable domain includes a histidine at any of the specific combinations of one or more amino acid positions in SEQ ID NO: 470 listed in Table 11.

[0551] In some examples of any of the ABPCs described herein, the first antigen-binding domain comprises a light chain variable domain that is at least 90% identical to SEQ ID NO: 471, wherein the light chain variable domain includes a histidine at position 34 in SEQ ID NO: 471; and a heavy chain variable domain that is at least 90% (e.g., at least 92%, at least 94%, at least 96%, at least 98%, at least 99%, or 100%) identical to SEQ ID NO: 470, where the heavy chain variable domain includes a histidine at any of the specific combinations of one or more amino acid positions in SEQ ID NO: 470 listed in Table 11.

[0552] In some examples of any of the ABPCs described herein, the first antigen-binding domain comprises a light chain variable domain that is at least 90% identical to SEQ ID NO: 471, wherein the light chain variable domain includes a histidine at position 50 in SEQ ID NO: 471; and a heavy chain variable domain that is at least 90% (e.g., at least 92%, at least 94%, at least 96%, at least 98%, at least 99%, or 100%) identical to SEQ ID NO: 470, where the heavy chain variable domain includes a histidine at any of the specific combinations of one or more amino acid positions in SEQ ID NO: 470 listed in Table 11.

[0553] In some examples of any of the ABPCs described herein, the first antigen-binding domain comprises a light chain variable domain that is at least 90% identical to SEQ ID NO: 471, wherein the light chain variable domain includes a histidine at position 51 in SEQ ID NO: 471; and a heavy chain variable domain that is at least 90% (e.g., at least 92%, at least 94%, at least 96%, at least 98%, at least 99%, or 100%) identical to SEQ ID NO: 470, where the heavy chain variable domain includes a histidine at any of the specific combinations of one or more amino acid positions in SEQ ID NO: 470 listed in Table 11.

[0554] In some examples of any of the ABPCs described herein, the first antigen-binding domain comprises a light chain variable domain that is at least 90% identical to SEQ ID NO: 471, wherein the light chain variable domain includes a histidine at position 53 in SEQ ID NO: 471; and a heavy chain variable domain that is at least 90% (e.g., at least 92%, at least 94%, at least 96%, at least 98%, at least 99%, or 100%) identical to SEQ ID NO: 470, where the heavy chain variable domain includes a histidine at any of the specific combinations of one or more amino acid positions in SEQ ID NO: 470 listed in Table 11.

[0555] In some examples of any of the ABPCs described herein, the first antigen-binding domain comprises a light chain variable domain that is at least 90% identical to SEQ ID NO: 471, wherein the light chain variable domain includes a histidine at position 55 in SEQ ID NO: 471; and a heavy chain variable domain that is at least 90% (e.g., at least 92%, at least 94%, at least 96%, at least 98%, at least 99%, or 100%) identical to SEQ ID NO: 470, where the heavy chain variable domain includes a histidine at any of the specific combinations of one or more amino acid positions in SEQ ID NO: 470 listed in Table 11.

[0556] In some examples of any of the ABPCs described herein, the first antigen-binding domain comprises a light chain variable domain that is at least 90% identical to SEQ ID NO: 471, wherein the light chain variable domain includes a histidine at position 89 in SEQ ID NO: 471; and a heavy chain variable domain that is at least 90% (e.g., at least 92%, at least 94%, at least 96%, at least 98%, at least 99%, or 100%) identical to SEQ ID NO: 470, where the heavy chain variable domain includes a histidine at any of the specific combinations of one or more amino acid positions in SEQ ID NO: 470 listed in Table 11.

[0557] In some examples of any of the ABPCs described herein, the first antigen-binding domain comprises a light chain variable domain that is at least 90% identical to SEQ ID NO: 471, wherein the light chain variable domain includes a histidine at position 92 in SEQ ID NO: 471; and a heavy chain variable domain that is at least 90% (e.g., at least 92%, at least 94%, at least 96%, at least 98%, at least 99%, or 100%) identical to SEQ ID NO: 470, where the heavy chain variable domain includes a histidine at any of the specific combinations of one or more amino acid positions in SEQ ID NO: 470 listed in Table 11.

[0558] In some examples of any of the ABPCs described herein, the first antigen-binding domain comprises a light chain variable domain that is at least 90% identical to SEQ ID NO: 471, wherein the light chain variable domain includes a histidine at position 94 in SEQ ID NO: 471; and a heavy chain variable domain that is at least 90% (e.g., at least 92%, at least 94%, at least 96%, at least 98%, at least 99%, or 100%) identical to SEQ ID NO: 470, where the heavy chain variable domain includes a histidine at any of the specific combinations of one or more amino acid positions in SEQ ID NO: 470 listed in Table 11.

[0559] In some examples of any of the ABPCs described herein, the first antigen-binding domain comprises a light chain variable domain that is at least 90% identical to SEQ ID NO: 471, wherein the light chain variable domain includes a histidine at position 96 in SEQ ID NO: 471; and a heavy chain variable domain that is at least 90% (e.g., at least 92%, at least 94%, at least 96%, at least 98%, at least 99%, or 100%) identical to SEQ ID NO: 470, where the heavy chain variable domain includes a histidine at any of the specific combinations of one or more amino acid positions in SEQ ID NO: 470 listed in Table 11.

[0560] In some examples of any of the ABPCs described herein, the first antigen-binding domain comprises a light chain variable domain that is at least 90% identical to SEQ ID NO: 471, wherein the light chain variable domain includes a histidine at position 97 in SEQ ID NO: 471; and a heavy chain variable domain that is at least 90% (e.g., at least 92%, at least 94%, at least 96%, at least 98%, at least 99%, or 100%) identical to SEQ ID NO: 470, where the heavy chain variable domain includes a histidine at any of the specific combinations of one or more amino acid positions in SEQ ID NO: 470 listed in Table 11.

[0561] In some examples of any of the ABPCs described herein, the first antigen-binding domain includes a heavy chain variable domain of SC16.34 with one or more (e.g., one, two, three, four, five, six, seven, eight, nine, ten, eleven, twelve, thirteen, fourteen, fifteen, sixteen, seventeen, eighteen, nineteen, or twenty) histidine(s) substituted with an alanine. In some examples of any of the ABPCs described herein, the first antigen-binding domain includes a light chain variable domain of SC16.34 with one or more (e.g., one, two, three, four, five, six, seven, eight, nine, ten, eleven, twelve, thirteen, fourteen, fifteen, sixteen, seventeen, eighteen, nineteen, or twenty) histidine(s) substituted with an alanine. In some examples of any of the ABPCs described herein, the first antigen-binding domain includes a heavy chain variable domain SC16.34 with one or more (e.g., one, two, three, four, five, six, seven, eight, nine, ten, eleven, twelve, thirteen, fourteen, fifteen, sixteen, seventeen, eighteen, nineteen, or twenty) histidines substituted with an alanine; and a light chain variable domain of SC16.34 with one or more (e.g., one, two, three, four, five, six, seven, eight, nine, ten, eleven, twelve, thirteen, fourteen, fifteen, sixteen, seventeen, eighteen, nineteen, or twenty) histidine(s) substituted with an alanine. In some examples of any of the ABPCs described herein, the heavy chain variable domain of SC16.34 comprises SEQ ID NO: 470. In some examples of any of the ABPCs described herein, the light chain variable domain of SC16.34 comprises SEQ ID NO: 471.

[0562] In some examples of any of the ABPCs described herein, the first antigen-binding domain comprises a heavy chain variable domain comprising a CDR1, a CDR2, and a CDR3 of SEQ ID NO: 646, SEQ ID NO: 647, and SEQ ID NO: 648, respectively, with collectively a total of one or more (e.g., one, two, three, four, five, six, seven, eight, nine, or ten) histidine(s) in SEQ ID NOs: 646-648 substituted with an alanine. In some examples of any of the ABPCs described herein, the first antigen-binding domain comprises a light chain variable domain comprising a CDR1, a CDR2, and a CDR3 of SEQ ID NO: 649, SEQ ID NO: 650, and SEQ ID NO: 651, respectively, with collectively a total of one or more (e.g., one, two, three, four, five, six, seven, eight, nine, or ten) histidine(s) in SEQ ID NOs: 649-651 substituted with an alanine. In some examples of any of the ABPCs described herein, the first antigen-binding domain includes: a heavy chain variable domain comprising a CDR1, a CDR2, and a CDR3 of SEQ ID NO: 646, SEQ ID NO: 647, and SEQ ID NO: 648, respectively, with collectively a total of one or more (e.g., one, two, three, four, five, six, seven, eight, nine, or ten) histidine(s) in SEQ ID NOs: 646-648 substituted with an alanine; and a light chain variable domain comprising a CDR1, a CDR2, and a CDR3 of SEQ ID NO: 649, SEQ ID NO: 650, and SEQ ID NO: 651, respectively, with collectively a total of one or more (e.g., one, two, three, four, five, six, seven, eight, nine, or ten) histidine(s) in SEQ ID NOs: 649-651 substituted with an alanine.

[0563] In some examples of any of the ABPCs described herein, the first antigen-binding domain comprises a heavy chain variable domain of SEQ ID NO: 470, SEQ ID NO: 472, SEQ ID NO: 473, SEQ ID NO: 474, SEQ ID NO: 475, SEQ ID NO: 476, SEQ ID NO: 477, SEQ ID NO: 478, SEQ ID NO: 479, SEQ ID NO: 480, SEQ ID NO: 481, SEQ ID NO: 482, SEQ ID NO: 483, SEQ ID NO: 484, SEQ ID NO: 485, SEQ ID NO: 486, SEQ ID NO: 487, SEQ ID NO: 488, SEQ ID NO: 489, SEQ ID NO: 490, SEQ ID NO: 491, SEQ ID NO: 492, SEQ ID NO: 493, SEQ ID NO: 494, SEQ ID NO: 495, SEQ ID NO: 496, SEQ ID NO: 497, SEQ ID NO: 498, SEQ ID NO: 499, SEQ ID NO: 500, SEQ ID NO: 501, SEQ ID NO: 502, SEQ ID NO: 503, SEQ ID NO: 504, SEQ ID NO: 505, SEQ ID NO: 506, SEQ ID NO: 507, SEQ ID NO: 508, SEQ ID NO: 509, SEQ ID NO: 510, SEQ ID NO: 511, or SEQ ID NO: 512.

[0564] In some examples of any of the ABPCs described herein, the first antigen-binding domain includes a light chain variable domain of SEQ ID NO: 471, SEQ ID NO: 513, SEQ ID NO: 514, SEQ ID NO: 515, SEQ ID NO: 516, SEQ ID NO: 517, SEQ ID NO: 518, SEQ ID NO: 519, SEQ ID NO: 520, SEQ ID NO: 521, SEQ ID NO: 522, SEQ ID NO: 523, SEQ ID NO: 524, SEQ ID NO: 525, SEQ ID NO: 526, SEQ ID NO: 527, SEQ ID NO: 528, SEQ ID NO: 529, SEQ ID NO: 530, SEQ ID NO: 531, SEQ ID NO: 532, SEQ ID NO: 533, SEQ ID NO: 534, SEQ ID NO: 535, or SEQ ID NO: 536.

[0565] In some examples of any of the ABPCs described herein, the first antigen-binding domain includes a light chain variable domain comprising SEQ ID NO: 471, and a heavy chain variable domain comprising SEQ ID NO: 470, SEQ ID NO: 472, SEQ ID NO: 473, SEQ ID NO: 474, SEQ ID NO: 475, SEQ ID NO: 476, SEQ ID NO: 477, SEQ ID NO: 478, SEQ ID NO: 479, SEQ ID NO: 480, SEQ ID NO: 481, SEQ ID NO: 482, SEQ ID NO: 483, SEQ ID NO: 484, SEQ ID NO: 485, SEQ ID NO: 486, SEQ ID NO: 487, SEQ ID NO: 488, SEQ ID NO: 489, SEQ ID NO: 490, SEQ ID NO: 491, SEQ ID NO: 492, SEQ ID NO: 493, SEQ ID NO: 494, SEQ ID NO: 495, SEQ ID NO: 496, SEQ ID NO: 497, SEQ ID NO: 498, SEQ ID NO: 499, SEQ ID NO: 500, SEQ ID NO: 501, SEQ ID NO: 502, SEQ ID NO: 503, SEQ ID NO: 504, SEQ ID NO: 505, SEQ ID NO: 506, SEQ ID NO: 507, SEQ ID NO: 508, SEQ ID NO: 509, SEQ ID NO: 510, SEQ ID NO: 511, or SEQ ID NO: 512.

[0566] In some examples of any of the ABPCs described herein, the first antigen-binding domain includes a light chain variable domain comprising SEQ ID NO: 513, and a heavy chain variable domain comprising SEQ ID NO: 470, SEQ ID NO: 472, SEQ ID NO: 473, SEQ ID NO: 474, SEQ ID NO: 475, SEQ ID NO: 476, SEQ ID NO: 477, SEQ ID NO: 478, SEQ ID NO: 479, SEQ ID NO: 480, SEQ ID NO: 481, SEQ ID NO: 482, SEQ ID NO: 483, SEQ ID NO: 484, SEQ ID NO: 485, SEQ ID NO: 486, SEQ ID NO: 487, SEQ ID NO: 488, SEQ ID NO: 489, SEQ ID NO: 490, SEQ ID NO: 491, SEQ ID NO: 492, SEQ ID NO: 493, SEQ ID NO: 494, SEQ ID NO: 495, SEQ ID NO: 496, SEQ ID NO: 497, SEQ ID NO: 498, SEQ ID NO: 499, SEQ ID NO: 500, SEQ ID NO: 501, SEQ ID NO: 502, SEQ ID NO: 503, SEQ ID NO: 504, SEQ ID NO: 505, SEQ ID NO: 506, SEQ ID NO: 507, SEQ ID NO: 508, SEQ ID NO: 509, SEQ ID NO: 510, SEQ ID NO: 511, or SEQ ID NO: 512.

[0567] In some examples of any of the ABPCs described herein, the first antigen-binding domain includes a light chain variable domain comprising SEQ ID NO: 514, and a heavy chain variable domain comprising SEQ ID NO: 470, SEQ ID NO: 472, SEQ ID NO: 473, SEQ ID NO: 474, SEQ ID NO: 475, SEQ ID NO: 476, SEQ ID NO: 477, SEQ ID NO: 478, SEQ ID NO: 479, SEQ ID NO: 480, SEQ ID NO: 481, SEQ ID NO: 482, SEQ ID NO: 483, SEQ ID NO: 484, SEQ ID NO: 485, SEQ ID NO: 486, SEQ ID NO: 487, SEQ ID NO: 488, SEQ ID NO: 489, SEQ ID NO: 490, SEQ ID NO: 491, SEQ ID NO: 492, SEQ ID NO: 493, SEQ ID NO: 494, SEQ ID NO: 495, SEQ ID NO: 496, SEQ ID NO: 497, SEQ ID NO: 498, SEQ ID NO: 499, SEQ ID NO: 500, SEQ ID NO: 501, SEQ ID NO: 502, SEQ ID NO: 503, SEQ ID NO: 504, SEQ ID NO: 505, SEQ ID NO: 506, SEQ ID NO: 507, SEQ ID NO: 508, SEQ ID NO: 509, SEQ ID NO: 510, SEQ ID NO: 511, or SEQ ID NO: 512.

[0568] In some examples of any of the ABPCs described herein, the first antigen-binding domain includes a light chain variable domain comprising SEQ ID NO: 515, and a heavy chain variable domain comprising SEQ ID NO: 470, SEQ ID NO: 472, SEQ ID NO: 473, SEQ ID NO: 474, SEQ ID NO: 475, SEQ ID NO: 476, SEQ ID NO: 477, SEQ ID NO: 478, SEQ ID NO: 479, SEQ ID NO: 480, SEQ ID NO: 481, SEQ ID NO: 482, SEQ ID NO: 483, SEQ ID NO: 484, SEQ ID NO: 485, SEQ ID NO: 486, SEQ ID NO: 487, SEQ ID NO: 488, SEQ ID NO: 489, SEQ ID NO: 490, SEQ ID NO: 491, SEQ ID NO: 492, SEQ ID NO: 493, SEQ ID NO: 494, SEQ ID NO: 495, SEQ ID NO: 496, SEQ ID NO: 497, SEQ ID NO: 498, SEQ ID NO: 499, SEQ ID NO: 500, SEQ ID NO: 501, SEQ ID NO: 502, SEQ ID NO: 503, SEQ ID NO: 504, SEQ ID NO: 505, SEQ ID NO: 506, SEQ ID NO: 507, SEQ ID NO: 508, SEQ ID NO: 509, SEQ ID NO: 510, SEQ ID NO: 511, or SEQ ID NO: 512.

[0569] In some examples of any of the ABPCs described herein, the first antigen-binding domain includes a light chain variable domain comprising SEQ ID NO: 516, and a heavy chain variable domain comprising SEQ ID NO: 470, SEQ ID NO: 472, SEQ ID NO: 473, SEQ ID NO: 474, SEQ ID NO: 475, SEQ ID NO: 476, SEQ ID NO: 477, SEQ ID NO: 478, SEQ ID NO: 479, SEQ ID NO: 480, SEQ ID NO: 481, SEQ ID NO: 482, SEQ ID NO: 483, SEQ ID NO: 484, SEQ ID NO: 485, SEQ ID NO: 486, SEQ ID NO: 487, SEQ ID NO: 488, SEQ ID NO: 489, SEQ ID NO: 490, SEQ ID NO: 491, SEQ ID NO: 492, SEQ ID NO: 493, SEQ ID NO: 494, SEQ ID NO: 495, SEQ ID NO: 496, SEQ ID NO: 497, SEQ ID NO: 498, SEQ ID NO: 499, SEQ ID NO: 500, SEQ ID NO: 501, SEQ ID NO: 502, SEQ ID NO: 503, SEQ ID NO: 504, SEQ ID NO: 505, SEQ ID NO: 506, SEQ ID NO: 507, SEQ ID NO: 508, SEQ ID NO: 509, SEQ ID NO: 510, SEQ ID NO: 511, or SEQ ID NO: 512.

[0570] In some examples of any of the ABPCs described herein, the first antigen-binding domain includes a light chain variable domain comprising SEQ ID NO: 517, and a heavy chain variable domain comprising SEQ ID NO: 470, SEQ ID NO: 472, SEQ ID NO: 473, SEQ ID NO: 474, SEQ ID NO: 475, SEQ ID NO: 476, SEQ ID NO: 477, SEQ ID NO: 478, SEQ ID NO: 479, SEQ ID NO: 480, SEQ ID NO: 481, SEQ ID NO: 482, SEQ ID NO: 483, SEQ ID NO: 484, SEQ ID NO: 485, SEQ ID NO: 486, SEQ ID NO: 487, SEQ ID NO: 488, SEQ ID NO: 489, SEQ ID NO: 490, SEQ ID NO: 491, SEQ ID NO: 492, SEQ ID NO: 493, SEQ ID NO: 494, SEQ ID NO: 495, SEQ ID NO: 496, SEQ ID NO: 497, SEQ ID NO: 498, SEQ ID NO: 499, SEQ ID NO: 500, SEQ ID NO: 501, SEQ ID NO: 502, SEQ ID NO: 503, SEQ ID NO: 504, SEQ ID NO: 505, SEQ ID NO: 506, SEQ ID NO: 507, SEQ ID NO: 508, SEQ ID NO: 509, SEQ ID NO: 510, SEQ ID NO: 511, or SEQ ID NO: 512.

[0571] In some examples of any of the ABPCs described herein, the first antigen-binding domain includes a light chain variable domain comprising SEQ ID NO: 518, and a heavy chain variable domain comprising SEQ ID NO: 470, SEQ ID NO: 472, SEQ ID NO: 473, SEQ ID NO: 474, SEQ ID NO: 475, SEQ ID NO: 476, SEQ ID NO: 477, SEQ ID NO: 478, SEQ ID NO: 479, SEQ ID NO: 480, SEQ ID NO: 481, SEQ ID NO: 482, SEQ ID NO: 483, SEQ ID NO: 484, SEQ ID NO: 485, SEQ ID NO: 486, SEQ ID NO: 487, SEQ ID NO: 488, SEQ ID NO: 489, SEQ ID NO: 490, SEQ ID NO: 491, SEQ ID NO: 492, SEQ ID NO: 493, SEQ ID NO: 494, SEQ ID NO: 495, SEQ ID NO: 496, SEQ ID NO: 497, SEQ ID NO: 498, SEQ ID NO: 499, SEQ ID NO: 500, SEQ ID NO: 501, SEQ ID NO: 502, SEQ ID NO: 503, SEQ ID NO: 504, SEQ ID NO: 505, SEQ ID NO: 506, SEQ ID NO: 507, SEQ ID NO: 508, SEQ ID NO: 509, SEQ ID NO: 510, SEQ ID NO: 511, or SEQ ID NO: 512.

[0572] In some examples of any of the ABPCs described herein, the first antigen-binding domain includes a light chain variable domain comprising SEQ ID NO: 519, and a heavy chain variable domain comprising SEQ ID NO: 470, SEQ ID NO: 472, SEQ ID NO: 473, SEQ ID NO: 474, SEQ ID NO: 475, SEQ ID NO: 476, SEQ ID NO: 477, SEQ ID NO: 478, SEQ ID NO: 479, SEQ ID NO: 480, SEQ ID NO: 481, SEQ ID NO: 482, SEQ ID NO: 483, SEQ ID NO: 484, SEQ ID NO: 485, SEQ ID NO: 486, SEQ ID NO: 487, SEQ ID NO: 488, SEQ ID NO: 489, SEQ ID NO: 490, SEQ ID NO: 491, SEQ ID NO: 492, SEQ ID NO: 493, SEQ ID NO: 494, SEQ ID NO: 495, SEQ ID NO: 496, SEQ ID NO: 497, SEQ ID NO: 498, SEQ ID NO: 499, SEQ ID NO: 500, SEQ ID NO: 501, SEQ ID NO: 502, SEQ ID NO: 503, SEQ ID NO: 504, SEQ ID NO: 505, SEQ ID NO: 506, SEQ ID NO: 507, SEQ ID NO: 508, SEQ ID NO: 509, SEQ ID NO: 510, SEQ ID NO: 511, or SEQ ID NO: 512.

[0573] In some examples of any of the ABPCs described herein, the first antigen-binding domain includes a light chain variable domain comprising SEQ ID NO: 520, and a heavy chain variable domain comprising SEQ ID NO: 470, SEQ ID NO: 472, SEQ ID NO: 473, SEQ ID NO: 474, SEQ ID NO: 475, SEQ ID NO: 476, SEQ ID NO: 477, SEQ ID NO: 478, SEQ ID NO: 479, SEQ ID NO: 480, SEQ ID NO: 481, SEQ ID NO: 482, SEQ ID NO: 483, SEQ ID NO: 484, SEQ ID NO: 485, SEQ ID NO: 486, SEQ ID NO: 487, SEQ ID NO: 488, SEQ ID NO: 489, SEQ ID NO: 490, SEQ ID NO: 491, SEQ ID NO: 492, SEQ ID NO: 493, SEQ ID NO: 494, SEQ ID NO: 495, SEQ ID NO: 496, SEQ ID NO: 497, SEQ ID NO: 498, SEQ ID NO: 499, SEQ ID NO: 500, SEQ ID NO: 501, SEQ ID NO: 502, SEQ ID NO: 503, SEQ ID NO: 504, SEQ ID NO: 505, SEQ ID NO: 506, SEQ ID NO: 507, SEQ ID NO: 508, SEQ ID NO: 509, SEQ ID NO: 510, SEQ ID NO: 511, or SEQ ID NO: 512.

[0574] In some examples of any of the ABPCs described herein, the first antigen-binding domain includes a light chain variable domain comprising SEQ ID NO: 521, and a heavy chain variable domain comprising SEQ ID NO: 470, SEQ ID NO: 472, SEQ ID NO: 473, SEQ ID NO: 474, SEQ ID NO: 475, SEQ ID NO: 476, SEQ ID NO: 477, SEQ ID NO: 478, SEQ ID NO: 479, SEQ ID NO: 480, SEQ ID NO: 481, SEQ ID NO: 482, SEQ ID NO: 483, SEQ ID NO: 484, SEQ ID NO: 485, SEQ ID NO: 486, SEQ ID NO: 487, SEQ ID NO: 488, SEQ ID NO: 489, SEQ ID NO: 490, SEQ ID NO: 491, SEQ ID NO: 492, SEQ ID NO: 493, SEQ ID NO: 494, SEQ ID NO: 495, SEQ ID NO: 496, SEQ ID NO: 497, SEQ ID NO: 498, SEQ ID NO: 499, SEQ ID NO: 500, SEQ ID NO: 501, SEQ ID NO: 502, SEQ ID NO: 503, SEQ ID NO: 504, SEQ ID NO: 505, SEQ ID NO: 506, SEQ ID NO: 507, SEQ ID NO: 508, SEQ ID NO: 509, SEQ ID NO: 510, SEQ ID NO: 511, or SEQ ID NO: 512.

[0575] In some examples of any of the ABPCs described herein, the first antigen-binding domain includes a light chain variable domain comprising SEQ ID NO: 522, and a heavy chain variable domain comprising SEQ ID NO: 470, SEQ ID NO: 472, SEQ ID NO: 473, SEQ ID NO: 474, SEQ ID NO: 475, SEQ ID NO: 476, SEQ ID NO: 477, SEQ ID NO: 478, SEQ ID NO: 479, SEQ ID NO: 480, SEQ ID NO: 481, SEQ ID NO: 482, SEQ ID NO: 483, SEQ ID NO: 484, SEQ ID NO: 485, SEQ ID NO: 486, SEQ ID NO: 487, SEQ ID NO: 488, SEQ ID NO: 489, SEQ ID NO: 490, SEQ ID NO: 491, SEQ ID NO: 492, SEQ ID NO: 493, SEQ ID NO: 494, SEQ ID NO: 495, SEQ ID NO: 496, SEQ ID NO: 497, SEQ ID NO: 498, SEQ ID NO: 499, SEQ ID NO: 500, SEQ ID NO: 501, SEQ ID NO: 502, SEQ ID NO: 503, SEQ ID NO: 504, SEQ ID NO: 505, SEQ ID NO: 506, SEQ ID NO: 507, SEQ ID NO: 508, SEQ ID NO: 509, SEQ ID NO: 510, SEQ ID NO: 511, or SEQ ID NO: 512.

[0576] In some examples of any of the ABPCs described herein, the first antigen-binding domain includes a light chain variable domain comprising SEQ ID NO: 523, and a heavy chain variable domain comprising SEQ ID NO: 470, SEQ ID NO: 472, SEQ ID NO: 473, SEQ ID NO: 474, SEQ ID NO: 475, SEQ ID NO: 476, SEQ ID NO: 477, SEQ ID NO: 478, SEQ ID NO: 479, SEQ ID NO: 480, SEQ ID NO: 481, SEQ ID NO: 482, SEQ ID NO: 483, SEQ ID NO: 484, SEQ ID NO: 485, SEQ ID NO: 486, SEQ ID NO: 487, SEQ ID NO: 488, SEQ ID NO: 489, SEQ ID NO: 490, SEQ ID NO: 491, SEQ ID NO: 492, SEQ ID NO: 493, SEQ ID NO: 494, SEQ ID NO: 495, SEQ ID NO: 496, SEQ ID NO: 497, SEQ ID NO: 498, SEQ ID NO: 499, SEQ ID NO: 500, SEQ ID NO: 501, SEQ ID NO: 502, SEQ ID NO: 503, SEQ ID NO: 504, SEQ ID NO: 505, SEQ ID NO: 506, SEQ ID NO: 507, SEQ ID NO: 508, SEQ ID NO: 509, SEQ ID NO: 510, SEQ ID NO: 511, or SEQ ID NO: 512.

[0577] In some examples of any of the ABPCs described herein, the first antigen-binding domain includes a light chain variable domain comprising SEQ ID NO: 524, and a heavy chain variable domain comprising SEQ ID NO: 470, SEQ ID NO: 472, SEQ ID NO: 473, SEQ ID NO: 474, SEQ ID NO: 475, SEQ ID NO: 476, SEQ ID NO: 477, SEQ ID NO: 478, SEQ ID NO: 479, SEQ ID NO: 480, SEQ ID NO: 481, SEQ ID NO: 482, SEQ ID NO: 483, SEQ ID NO: 484, SEQ ID NO: 485, SEQ ID NO: 486, SEQ ID NO: 487, SEQ ID NO: 488, SEQ ID NO: 489, SEQ ID NO: 490, SEQ ID NO: 491, SEQ ID NO: 492, SEQ ID NO: 493, SEQ ID NO: 494, SEQ ID NO: 495, SEQ ID NO: 496, SEQ ID NO: 497, SEQ ID NO: 498, SEQ ID NO: 499, SEQ ID NO: 500, SEQ ID NO: 501, SEQ ID NO: 502, SEQ ID NO: 503, SEQ ID NO: 504, SEQ ID NO: 505, SEQ ID NO: 506, SEQ ID NO: 507, SEQ ID NO: 508, SEQ ID NO: 509, SEQ ID NO: 510, SEQ ID NO: 511, or SEQ ID NO: 512.

[0578] In some examples of any of the ABPCs described herein, the first antigen-binding domain includes a light chain variable domain comprising SEQ ID NO: 525, and a heavy chain variable domain comprising SEQ ID NO: 470, SEQ ID NO: 472, SEQ ID NO: 473, SEQ ID NO: 474, SEQ ID NO: 475, SEQ ID NO: 476, SEQ ID NO: 477, SEQ ID NO: 478, SEQ ID NO: 479, SEQ ID NO: 480, SEQ ID NO: 481, SEQ ID NO: 482, SEQ ID NO: 483, SEQ ID NO: 484, SEQ ID NO: 485, SEQ ID NO: 486, SEQ ID NO: 487, SEQ ID NO: 488, SEQ ID NO: 489, SEQ ID NO: 490, SEQ ID NO: 491, SEQ ID NO: 492, SEQ ID NO: 493, SEQ ID NO: 494, SEQ ID NO: 495, SEQ ID NO: 496, SEQ ID NO: 497, SEQ ID NO: 498, SEQ ID NO: 499, SEQ ID NO: 500, SEQ ID NO: 501, SEQ ID NO: 502, SEQ ID NO: 503, SEQ ID NO: 504, SEQ ID NO: 505, SEQ ID NO: 506, SEQ ID NO: 507, SEQ ID NO: 508, SEQ ID NO: 509, SEQ ID NO: 510, SEQ ID NO: 511, or SEQ ID NO: 512.

[0579] In some examples of any of the ABPCs described herein, the first antigen-binding domain includes a light chain variable domain comprising SEQ ID NO: 526, and a heavy chain variable domain comprising SEQ ID NO: 470, SEQ ID NO: 472, SEQ ID NO: 473, SEQ ID NO: 474, SEQ ID NO: 475, SEQ ID NO: 476, SEQ ID NO: 477, SEQ ID NO: 478, SEQ ID NO: 479, SEQ ID NO: 480, SEQ ID NO: 481, SEQ ID NO: 482, SEQ ID NO: 483, SEQ ID NO: 484, SEQ ID NO: 485, SEQ ID NO: 486, SEQ ID NO: 487, SEQ ID NO: 488, SEQ ID NO: 489, SEQ ID NO: 490, SEQ ID NO: 491, SEQ ID NO: 492, SEQ ID NO: 493, SEQ ID NO: 494, SEQ ID NO: 495, SEQ ID NO: 496, SEQ ID NO: 497, SEQ ID NO: 498, SEQ ID NO: 499, SEQ ID NO: 500, SEQ ID NO: 501, SEQ ID NO: 502, SEQ ID NO: 503, SEQ ID NO: 504, SEQ ID NO: 505, SEQ ID NO: 506, SEQ ID NO: 507, SEQ ID NO: 508, SEQ ID NO: 509, SEQ ID NO: 510, SEQ ID NO: 511, or SEQ ID NO: 512.

[0580] In some examples of any of the ABPCs described herein, the first antigen-binding domain includes a light chain variable domain comprising SEQ ID NO: 527, and a heavy chain variable domain comprising SEQ ID NO: 470, SEQ ID NO: 472, SEQ ID NO: 473, SEQ ID NO: 474, SEQ ID NO: 475, SEQ ID NO: 476, SEQ ID NO: 477, SEQ ID NO: 478, SEQ ID NO: 479, SEQ ID NO: 480, SEQ ID NO: 481, SEQ ID NO: 482, SEQ ID NO: 483, SEQ ID NO: 484, SEQ ID NO: 485, SEQ ID NO: 486, SEQ ID NO: 487, SEQ ID NO: 488, SEQ ID NO: 489, SEQ ID NO: 490, SEQ ID NO: 491, SEQ ID NO: 492, SEQ ID NO: 493, SEQ ID NO: 494, SEQ ID NO: 495, SEQ ID NO: 496, SEQ ID NO: 497, SEQ ID NO: 498, SEQ ID NO: 499, SEQ ID NO: 500, SEQ ID NO: 501, SEQ ID NO: 502, SEQ ID NO: 503, SEQ ID NO: 504, SEQ ID NO: 505, SEQ ID NO: 506, SEQ ID NO: 507, SEQ ID NO: 508, SEQ ID NO: 509, SEQ ID NO: 510, SEQ ID NO: 511, or SEQ ID NO: 512.

[0581] In some examples of any of the ABPCs described herein, the first antigen-binding domain includes a light chain variable domain comprising SEQ ID NO: 528, and a heavy chain variable domain comprising SEQ ID NO: 470, SEQ ID NO: 472, SEQ ID NO: 473, SEQ ID NO: 474, SEQ ID NO: 475, SEQ ID NO: 476, SEQ ID NO: 477, SEQ ID NO: 478, SEQ ID NO: 479, SEQ ID NO: 480, SEQ ID NO: 481, SEQ ID NO: 482, SEQ ID NO: 483, SEQ ID NO: 484, SEQ ID NO: 485, SEQ ID NO: 486, SEQ ID NO: 487, SEQ ID NO: 488, SEQ ID NO: 489, SEQ ID NO: 490, SEQ ID NO: 491, SEQ ID NO: 492, SEQ ID NO: 493, SEQ ID NO: 494, SEQ ID NO: 495, SEQ ID NO: 496, SEQ ID NO: 497, SEQ ID NO: 498, SEQ ID NO: 499, SEQ ID NO: 500, SEQ ID NO: 501, SEQ ID NO: 502, SEQ ID NO: 503, SEQ ID NO: 504, SEQ ID NO: 505, SEQ ID NO: 506, SEQ ID NO: 507, SEQ ID NO: 508, SEQ ID NO: 509, SEQ ID NO: 510, SEQ ID NO: 511, or SEQ ID NO: 512.

[0582] In some examples of any of the ABPCs described herein, the first antigen-binding domain includes a light chain variable domain comprising SEQ ID NO: 529, and a heavy chain variable domain comprising SEQ ID NO: 470, SEQ ID NO: 472, SEQ ID NO: 473, SEQ ID NO: 474, SEQ ID NO: 475, SEQ ID NO: 476, SEQ ID NO: 477, SEQ ID NO: 478, SEQ ID NO: 479, SEQ ID NO: 480, SEQ ID NO: 481, SEQ ID NO: 482, SEQ ID NO: 483, SEQ ID NO: 484, SEQ ID NO: 485, SEQ ID NO: 486, SEQ ID NO: 487, SEQ ID NO: 488, SEQ ID NO: 489, SEQ ID NO: 490, SEQ ID NO: 491, SEQ ID NO: 492, SEQ ID NO: 493, SEQ ID NO: 494, SEQ ID NO: 495, SEQ ID NO: 496, SEQ ID NO: 497, SEQ ID NO: 498, SEQ ID NO: 499, SEQ ID NO: 500, SEQ ID NO: 501, SEQ ID NO: 502, SEQ ID NO: 503, SEQ ID NO: 504, SEQ ID NO: 505, SEQ ID NO: 506, SEQ ID NO: 507, SEQ ID NO: 508, SEQ ID NO: 509, SEQ ID NO: 510, SEQ ID NO: 511, or SEQ ID NO: 512.

[0583] In some examples of any of the ABPCs described herein, the first antigen-binding domain includes a light chain variable domain comprising SEQ ID NO: 530, and a heavy chain variable domain comprising SEQ ID NO: 470, SEQ ID NO: 472, SEQ ID NO: 473, SEQ ID NO: 474, SEQ ID NO: 475, SEQ ID NO: 476, SEQ ID NO: 477, SEQ ID NO: 478, SEQ ID NO: 479, SEQ ID NO: 480, SEQ ID NO: 481, SEQ ID NO: 482, SEQ ID NO: 483, SEQ ID NO: 484, SEQ ID NO: 485, SEQ ID NO: 486, SEQ ID NO: 487, SEQ ID NO: 488, SEQ ID NO: 489, SEQ ID NO: 490, SEQ ID NO: 491, SEQ ID NO: 492, SEQ ID NO: 493, SEQ ID NO: 494, SEQ ID NO: 495, SEQ ID NO: 496, SEQ ID NO: 497, SEQ ID NO: 498, SEQ ID NO: 499, SEQ ID NO: 500, SEQ ID NO: 501, SEQ ID NO: 502, SEQ ID NO: 503, SEQ ID NO: 504, SEQ ID NO: 505, SEQ ID NO: 506, SEQ ID NO: 507, SEQ ID NO: 508, SEQ ID NO: 509, SEQ ID NO: 510, SEQ ID NO: 511, or SEQ ID NO: 512.

[0584] In some examples of any of the ABPCs described herein, the first antigen-binding domain includes a light chain variable domain comprising SEQ ID NO: 531, and a heavy chain variable domain comprising SEQ ID NO: 470, SEQ ID NO: 472, SEQ ID NO: 473, SEQ ID NO: 474, SEQ ID NO: 475, SEQ ID NO: 476, SEQ ID NO: 477, SEQ ID NO: 478, SEQ ID NO: 479, SEQ ID NO: 480, SEQ ID NO: 481, SEQ ID NO: 482, SEQ ID NO: 483, SEQ ID NO: 484, SEQ ID NO: 485, SEQ ID NO: 486, SEQ ID NO: 487, SEQ ID NO: 488, SEQ ID NO: 489, SEQ ID NO: 490, SEQ ID NO: 491, SEQ ID NO: 492, SEQ ID NO: 493, SEQ ID NO: 494, SEQ ID NO: 495, SEQ ID NO: 496, SEQ ID NO: 497, SEQ ID NO: 498, SEQ ID NO: 499, SEQ ID NO: 500, SEQ ID NO: 501, SEQ ID NO: 502, SEQ ID NO: 503, SEQ ID NO: 504, SEQ ID NO: 505, SEQ ID NO: 506, SEQ ID NO: 507, SEQ ID NO: 508, SEQ ID NO: 509, SEQ ID NO: 510, SEQ ID NO: 511, or SEQ ID NO: 512.

[0585] In some examples of any of the ABPCs described herein, the first antigen-binding domain includes a light chain variable domain comprising SEQ ID NO: 532, and a heavy chain variable domain comprising SEQ ID NO: 470, SEQ ID NO: 472, SEQ ID NO: 473, SEQ ID NO: 474, SEQ ID NO: 475, SEQ ID NO: 476, SEQ ID NO: 477, SEQ ID NO: 478, SEQ ID NO: 479, SEQ ID NO: 480, SEQ ID NO: 481, SEQ ID NO: 482, SEQ ID NO: 483, SEQ ID NO: 484, SEQ ID NO: 485, SEQ ID NO: 486, SEQ ID NO: 487, SEQ ID NO: 488, SEQ ID NO: 489, SEQ ID NO: 490, SEQ ID NO: 491, SEQ ID NO: 492, SEQ ID NO: 493, SEQ ID NO: 494, SEQ ID NO: 495, SEQ ID NO: 496, SEQ ID NO: 497, SEQ ID NO: 498, SEQ ID NO: 499, SEQ ID NO: 500, SEQ ID NO: 501, SEQ ID NO: 502, SEQ ID NO: 503, SEQ ID NO: 504, SEQ ID NO: 505, SEQ ID NO: 506, SEQ ID NO: 507, SEQ ID NO: 508, SEQ ID NO: 509, SEQ ID NO: 510, SEQ ID NO: 511, or SEQ ID NO: 512.

[0586] In some examples of any of the ABPCs described herein, the first antigen-binding domain includes a light chain variable domain comprising SEQ ID NO: 533, and a heavy chain variable domain comprising SEQ ID NO: 470, SEQ ID NO: 472, SEQ ID NO: 473, SEQ ID NO: 474, SEQ ID NO: 475, SEQ ID NO: 476, SEQ ID NO: 477, SEQ ID NO: 478, SEQ ID NO: 479, SEQ ID NO: 480, SEQ ID NO: 481, SEQ ID NO: 482, SEQ ID NO: 483, SEQ ID NO: 484, SEQ ID NO: 485, SEQ ID NO: 486, SEQ ID NO: 487, SEQ ID NO: 488, SEQ ID NO: 489, SEQ ID NO: 490, SEQ ID NO: 491, SEQ ID NO: 492, SEQ ID NO: 493, SEQ ID NO: 494, SEQ ID NO: 495, SEQ ID NO: 496, SEQ ID NO: 497, SEQ ID NO: 498, SEQ ID NO: 499, SEQ ID NO: 500, SEQ ID NO: 501, SEQ ID NO: 502, SEQ ID NO: 503, SEQ ID NO: 504, SEQ ID NO: 505, SEQ ID NO: 506, SEQ ID NO: 507, SEQ ID NO: 508, SEQ ID NO: 509, SEQ ID NO: 510, SEQ ID NO: 511, or SEQ ID NO: 512.

[0587] In some examples of any of the ABPCs described herein, the first antigen-binding domain includes a light chain variable domain comprising SEQ ID NO: 534, and a heavy chain variable domain comprising SEQ ID NO: 470, SEQ ID NO: 472, SEQ ID NO: 473, SEQ ID NO: 474, SEQ ID NO: 475, SEQ ID NO: 476, SEQ ID NO: 477, SEQ ID NO: 478, SEQ ID NO: 479, SEQ ID NO: 480, SEQ ID NO: 481, SEQ ID NO: 482, SEQ ID NO: 483, SEQ ID NO: 484, SEQ ID NO: 485, SEQ ID NO: 486, SEQ ID NO: 487, SEQ ID NO: 488, SEQ ID NO: 489, SEQ ID NO: 490, SEQ ID NO: 491, SEQ ID NO: 492, SEQ ID NO: 493, SEQ ID NO: 494, SEQ ID NO: 495, SEQ ID NO: 496, SEQ ID NO: 497, SEQ ID NO: 498, SEQ ID NO: 499, SEQ ID NO: 500, SEQ ID NO: 501, SEQ ID NO: 502, SEQ ID NO: 503, SEQ ID NO: 504, SEQ ID NO: 505, SEQ ID NO: 506, SEQ ID NO: 507, SEQ ID NO: 508, SEQ ID NO: 509, SEQ ID NO: 510, SEQ ID NO: 511, or SEQ ID NO: 512.

[0588] In some examples of any of the ABPCs described herein, the first antigen-binding domain includes a light chain variable domain comprising SEQ ID NO: 535, and a heavy chain variable domain comprising SEQ ID NO: 470, SEQ ID NO: 472, SEQ ID NO: 473, SEQ ID NO: 474, SEQ ID NO: 475, SEQ ID NO: 476, SEQ ID NO: 477, SEQ ID NO: 478, SEQ ID NO: 479, SEQ ID NO: 480, SEQ ID NO: 481, SEQ ID NO: 482, SEQ ID NO: 483, SEQ ID NO: 484, SEQ ID NO: 485, SEQ ID NO: 486, SEQ ID NO: 487, SEQ ID NO: 488, SEQ ID NO: 489, SEQ ID NO: 490, SEQ ID NO: 491, SEQ ID NO: 492, SEQ ID NO: 493, SEQ ID NO: 494, SEQ ID NO: 495, SEQ ID NO: 496, SEQ ID NO: 497, SEQ ID NO: 498, SEQ ID NO: 499, SEQ ID NO: 500, SEQ ID NO: 501, SEQ ID NO: 502, SEQ ID NO: 503, SEQ ID NO: 504, SEQ ID NO: 505, SEQ ID NO: 506, SEQ ID NO: 507, SEQ ID NO: 508, SEQ ID NO: 509, SEQ ID NO: 510, SEQ ID NO: 511, or SEQ ID NO: 512.

[0589] In some examples of any of the ABPCs described herein, the first antigen-binding domain includes a light chain variable domain comprising SEQ ID NO: 536, and a heavy chain variable domain comprising SEQ ID NO: 470, SEQ ID NO: 472, SEQ ID NO: 473, SEQ ID NO: 474, SEQ ID NO: 475, SEQ ID NO: 476, SEQ ID NO: 477, SEQ ID NO: 478, SEQ ID NO: 479, SEQ ID NO: 480, SEQ ID NO: 481, SEQ ID NO: 482, SEQ ID NO: 483, SEQ ID NO: 484, SEQ ID NO: 485, SEQ ID NO: 486, SEQ ID NO: 487, SEQ ID NO: 488, SEQ ID NO: 489, SEQ ID NO: 490, SEQ ID NO: 491, SEQ ID NO: 492, SEQ ID NO: 493, SEQ ID NO: 494, SEQ ID NO: 495, SEQ ID NO: 496, SEQ ID NO: 497, SEQ ID NO: 498, SEQ ID NO: 499, SEQ ID NO: 500, SEQ ID NO: 501, SEQ ID NO: 502, SEQ ID NO: 503, SEQ ID NO: 504, SEQ ID NO: 505, SEQ ID NO: 506, SEQ ID NO: 507, SEQ ID NO: 508, SEQ ID NO: 509, SEQ ID NO: 510, SEQ ID NO: 511, or SEQ ID NO: 512.

[0590] In some examples of any of the ABPCs described herein, the first antigen-binding domain includes a heavy chain variable domain of SC16.67 with one or more (e.g., one, two, three, four, five, six, seven, eight, nine, ten, eleven, twelve, thirteen, fourteen, fifteen, sixteen, seventeen, eighteen, nineteen, or twenty) amino acids substituted with a histidine. In some examples of any of the ABPCs described herein, the first antigen-binding domain includes a light chain variable domain of SC16.67 with one or more (e.g., one, two, three, four, five, six, seven, eight, nine, ten, eleven, twelve, thirteen, fourteen, fifteen, sixteen, seventeen, eighteen, nineteen, or twenty) amino acids substituted with a histidine. In some examples of any of the ABPCs described herein, the first antigen-binding domain includes a heavy chain variable domain of SC16.67 with one or more (e.g., one, two, three, four, five, six, seven, eight, nine, ten, eleven, twelve, thirteen, fourteen, fifteen, sixteen, seventeen, eighteen, nineteen, or twenty) amino acids substituted with a histidine; and a light chain variable domain of SC16.67 with one or more (e.g., one, two, three, four, five, six, seven, eight, nine, ten, eleven, twelve, thirteen, fourteen, fifteen, sixteen, seventeen, eighteen, nineteen, or twenty) amino acids substituted with a histidine. In some examples of any of the ABPCs described herein, the heavy chain variable domain of SC16.67 comprises SEQ ID NO: 537. In some examples of any of the ABPCs described herein, the light chain variable domain of SC16.67 comprises SEQ ID NO: 538.

[0591] In some examples of any of the ABPCs described herein, the first antigen-binding domain comprises a heavy chain variable domain comprising a CDR1, a CDR2, and a CDR3 of SEQ ID NO: 652, SEQ ID NO: 653, and SEQ ID NO: 654, respectively, with collectively a total of one or more (e.g., one, two, three, four, five, six, seven, eight, nine, or ten) amino acid positions in SEQ ID NOs: 652-654 substituted with a histidine. In some examples of any of the ABPCs described herein, the first antigen-binding domain comprises a light chain variable domain comprising a CDR1, a CDR2, and a CDR3 of SEQ ID NO: 655 SEQ ID NO: 656, and SEQ ID NO: 657, respectively, with collectively a total of one or more (e.g., one, two, three, four, five, six, seven, eight, nine, or ten) amino acid positions in SEQ ID NOs: 655-657 substituted with a histidine. In some examples of any of the ABPCs described herein, the first antigen-binding domain includes: a heavy chain variable domain comprising a CDR1, a CDR2, and a CDR3 of SEQ ID NO: 652, SEQ ID NO: 653, and SEQ ID NO: 654, respectively, with collectively a total of one or more (e.g., one, two, three, four, five, six, seven, eight, nine, or ten) amino acid positions in SEQ ID NOs: 652-654 substituted with a histidine; and a light chain variable domain comprising a CDR1, a CDR2, and a CDR3 of SEQ ID NO: 655, SEQ ID NO: 656, and SEQ ID NO: 657, respectively, with collectively a total of one or more (e.g., one, two, three, four, five, six, seven, eight, nine, or ten) amino acid positions in SEQ ID NOs: 655-657 substituted with a histidine.

[0592] In some examples of any of the ABPCs described herein, the first antigen-binding domain includes a heavy chain variable domain that is at least 90% (e.g., at least 92%, at least 94%, at least 96%, at least 98%, at least 99%, or 100%) identical to SEQ ID NO: 537, where the heavy chain variable domain includes a histidine at one or more (e.g., one, two, three, four, five, six, seven, eight, nine, ten, eleven, twelve, thirteen, fourteen, fifteen, sixteen, seventeen, eighteen, nineteen, or twenty) amino acid positions in SEQ ID NO: 537 selected from the group consisting of: 26, 29, 31, 32, 53, 54, 57, 58, 59, 65, 67, 68, 103, 104, and 106. In some examples of any of the ABPCs described herein, the first antigen-binding domain includes a light chain variable domain that is at least 90% (e.g., at least 92%, at least 94%, at least 96%, at least 98%, at least 99%, or 100%) identical to SEQ ID NO: 538, where the light chain variable domain includes a histidine at one or more (e.g., one, two, three, four, five, six, seven, eight, nine, ten, eleven, twelve, thirteen, fourteen, fifteen, sixteen, seventeen, eighteen, nineteen, or twenty) amino acid positions in SEQ ID NO: 538 selected from the group consisting of: 28, 34, 53, 93, 94, and 98. In some examples of any of the ABPCs described herein the first antigen-binding domain includes: a heavy chain variable domain that is at least 90% (e.g., at least 92%, at least 94%, at least 96%, at least 98%, at least 99%, or 100%) identical to SEQ ID NO: 537, where the heavy chain variable domain includes a histidine at one or more (e.g., one, two, three, four, five, six, seven, eight, nine, ten, eleven, twelve, thirteen, fourteen, fifteen, sixteen, seventeen, eighteen, nineteen, or twenty) amino acid positions in SEQ ID NO: 537 selected from the group consisting of: 26, 29, 31, 32, 53, 54, 57, 58, 59, 65, 67, 68, 103, 104, and 106 and a light chain variable domain that is at least 90% (e.g., at least 92%, at least 94%, at least 96%, at least 98%, at least 99%, or 100%) identical to SEQ ID NO: 538, where the light chain variable domain includes a histidine at one or more (e.g., one, two, three, four, five, six, seven, eight, nine, ten, eleven, twelve, thirteen, fourteen, fifteen, sixteen, seventeen, eighteen, nineteen, or twenty) amino acid positions in SEQ ID NO: 538 selected from the group consisting of: 28, 34, 53, 93, 94, and 98.

[0593] In some examples of any of the ABPCs described herein, a heavy chain variable domain includes a heavy chain variable domain that is at least 90% (e.g., at least 92%, at least 94%, at least 96%, at least 98%, at least 99%, or 100%) identical to SEQ ID NO: 537, where the heavy chain variable domain includes a histidine at any of the specific combinations of one or more amino acid positions in SEQ ID NO: 537 listed in Table 13.

TABLE 13
Exemplary Combinations of Amino Acid Positions in SEQ
ID NO: 537 that can be substituted with histidine

26 + 29, 26 + 31, 26 + 32, 26 + 53, 26 + 54, 26 + 57, 26 + 58, 26 + 59, 26 + 65, 26 + 67, 26 +
68, 26 + 103, 26 + 104, 26 + 106, 29 + 31, 29 + 32, 29 + 53, 29 + 54, 29 + 57, 29 + 58, 29 +
59, 29 + 65, 29 + 67, 29 + 68, 29 + 103, 29 + 104, 29 + 106, 31 + 32, 31 + 53, 31 + 54, 31 +
57, 31 + 58, 31 + 59, 31 + 65, 31 + 67, 31 + 68, 31 + 103, 31 + 104, 31 + 106, 32 + 53, 32 +
54, 32 + 57, 32 + 58, 32 + 59, 32 + 65, 32 + 67, 32 + 68, 32 + 103, 32 + 104, 32 + 106, 53 +
54, 53 + 57, 53 + 58, 53 + 59, 53 + 65, 53 + 67, 53 + 68, 53 + 103, 53 + 104, 53 + 106, 54 +
57, 54 + 58, 54 + 59, 54 + 65, 54 + 67, 54 + 68, 54 + 103, 54 + 104, 54 + 106, 57 + 58, 57 +
59, 57 + 65, 57 + 67, 57 + 68, 57 + 103, 57 + 104, 57 + 106, 58 + 59, 58 + 65, 58 + 67, 58 +
68, 58 + 103, 58 + 104, 58 + 106, 59 + 65, 59 + 67, 59 + 68, 59 + 103, 59 + 104, 59 + 106, 65 +
67, 65 + 68, 65 + 103, 65 + 104, 65 + 106, 67 + 68, 67 + 103, 67 + 104, 67 + 106, 68 + 103,
68 + 104, 68 + 106, 103 + 104, 103 + 106, 104 + 106, 26 + 29 + 31, 26 + 29 + 32, 26 + 29 +
53, 26 + 29 + 54, 26 + 29 + 57, 26 + 29 + 58, 26 + 29 + 59, 26 + 29 + 65, 26 + 29 + 67, 26 +
29 + 68, 26 + 29 + 103, 26 + 29 + 104, 26 + 29 + 106, 26 + 31 + 32, 26 + 31 + 53, 26 + 31 +
54, 26 + 31 + 57, 26 + 31 + 58, 26 + 31 + 59, 26 + 31 + 65, 26 + 31 + 67, 26 + 31 + 68, 26 +
31 + 103, 26 + 31 + 104, 26 + 31 + 106, 26 + 32 + 53, 26 + 32 + 54, 26 + 32 + 57, 26 + 32 +
58, 26 + 32 + 59, 26 + 32 + 65, 26 + 32 + 67, 26 + 32 + 68, 26 + 32 + 103, 26 + 32 + 104, 26 +
32 + 106, 26 + 53 + 54, 26 + 53 + 57, 26 + 53 + 58, 26 + 53 + 59, 26 + 53 + 65, 26 + 53 +
67, 26 + 53 + 68, 26 + 53 + 103, 26 + 53 + 104, 26 + 53 + 106, 26 + 54 + 57, 26 + 54 + 58, 26 +
54 + 59, 26 + 54 + 65, 26 + 54 + 67, 26 + 54 + 68, 26 + 54 + 103, 26 + 54 + 104, 26 + 54 +
106, 26 + 57 + 58, 26 + 57 + 59, 26 + 57 + 65, 26 + 57 + 67, 26 + 57 + 68, 26 + 57 + 103, 26 +
57 + 104, 26 + 57 + 106, 26 + 58 + 59, 26 + 58 + 65, 26 + 58 + 67, 26 + 58 + 68, 26 + 58 +
103, 26 + 58 + 104, 26 + 58 + 106, 26 + 59 + 65, 26 + 59 + 67, 26 + 59 + 68, 26 + 59 + 103,
26 + 59 + 104, 26 + 59 + 106, 26 + 65 + 67, 26 + 65 + 68, 26 + 65 + 103, 26 + 65 + 104, 26 +
65 + 106, 26 + 67 + 68, 26 + 67 + 103, 26 + 67 + 104, 26 + 67 + 106, 26 + 68 + 103, 26 + 68 +
104, 26 + 68 + 106, 26 + 103 + 104, 26 + 103 + 106, 26 + 104 + 106, 29 + 31 + 32, 29 + 31 +
53, 29 + 31 + 54, 29 + 31 + 57, 29 + 31 + 58, 29 + 31 + 59, 29 + 31 + 65, 29 + 31 + 67, 29 +
31 + 68, 29 + 31 + 103, 29 + 31 + 104, 29 + 31 + 106, 29 + 32 + 53, 29 + 32 + 54, 29 + 32 +
57, 29 + 32 + 58, 29 + 32 + 59, 29 + 32 + 65, 29 + 32 + 67, 29 + 32 + 68, 29 + 32 + 103, 29 +
32 + 104, 29 + 32 + 106, 29 + 53 + 54, 29 + 53 + 57, 29 + 53 + 58, 29 + 53 + 59, 29 + 53 +
65, 29 + 53 + 67, 29 + 53 + 68, 29 + 53 + 103, 29 + 53 + 104, 29 + 53 + 106, 29 + 54 + 57, 29 +
54 + 58, 29 + 54 + 59, 29 + 54 + 65, 29 + 54 + 67, 29 + 54 + 68, 29 + 54 + 103, 29 + 54 +
104, 29 + 54 + 106, 29 + 57 + 58, 29 + 57 + 59, 29 + 57 + 65, 29 + 57 + 67, 29 + 57 + 68, 29 +
57 + 103, 29 + 57 + 104, 29 + 57 + 106, 29 + 58 + 59, 29 + 58 + 65, 29 + 58 + 67, 29 + 58 +
68, 29 + 58 + 103, 29 + 58 + 104, 29 + 58 + 106, 29 + 59 + 65, 29 + 59 + 67, 29 + 59 + 68, 29 +
59 + 103, 29 + 59 + 104, 29 + 59 + 106, 29 + 65 + 67, 29 + 65 + 68, 29 + 65 + 103, 29 + 65 +
104, 29 + 65 + 106, 29 + 67 + 68, 29 + 67 + 103, 29 + 67 + 104, 29 + 67 + 106, 29 + 68 +
103, 29 + 68 + 104, 29 + 68 + 106, 29 + 103 + 104, 29 + 103 + 106, 29 + 104 + 106, 31 + 32 +
53, 31 + 32 + 54, 31 + 32 + 57, 31 + 32 + 58, 31 + 32 + 59, 31 + 32 + 65, 31 + 32 + 67, 31 +
32 + 68, 31 + 32 + 103, 31 + 32 + 104, 31 + 32 + 106, 31 + 53 + 54, 31 + 53 + 57, 31 + 53 +
58, 31 + 53 + 59, 31 + 53 + 65, 31 + 53 + 67, 31 + 53 + 68, 31 + 53 + 103, 31 + 53 + 104, 31 +
53 + 106, 31 + 54 + 57, 31 + 54 + 58, 31 + 54 + 59, 31 + 54 + 65, 31 + 54 + 67, 31 + 54 +
68, 31 + 54 + 103, 31 + 54 + 104, 31 + 54 + 106, 31 + 57 + 58, 31 + 57 + 59, 31 + 57 + 65, 31 +
57 + 67, 31 + 57 + 68, 31 + 57 + 103, 31 + 57 + 104, 31 + 57 + 106, 31 + 58 + 59, 31 + 58 +
65, 31 + 58 + 67, 31 + 58 + 68, 31 + 58 + 103, 31 + 58 + 104, 31 + 58 + 106, 31 + 59 + 65, 31 +
59 + 67, 31 + 59 + 68, 31 + 59 + 103, 31 + 59 + 104, 31 + 59 + 106, 31 + 65 + 67, 31 + 65 +
68, 31 + 65 + 103, 31 + 65 + 104, 31 + 65 + 106, 31 + 67 + 68, 31 + 67 + 103, 31 + 67 + 104,
31 + 67 + 106, 31 + 68 + 103, 31 + 68 + 104, 31 + 68 + 106, 31 + 103 + 104, 31 + 103 + 106,
31 + 104 + 106, 32 + 53 + 54, 32 + 53 + 57, 32 + 53 + 58, 32 + 53 + 59, 32 + 53 + 65, 32 + 53 +
67, 32 + 53 + 68, 32 + 53 + 103, 32 + 53 + 104, 32 + 53 + 106, 32 + 54 + 57, 32 + 54 + 58,
32 + 54 + 59, 32 + 54 + 65, 32 + 54 + 67, 32 + 54 + 68, 32 + 54 + 103, 32 + 54 + 104, 32 + 54 +
106, 32 + 57 + 58, 32 + 57 + 59, 32 + 57 + 65, 32 + 57 + 67, 32 + 57 + 68, 32 + 57 + 103,
32 + 57 + 104, 32 + 57 + 106, 32 + 58 + 59, 32 + 58 + 65, 32 + 58 + 67, 32 + 58 + 68, 32 + 58 +
103, 32 + 58 + 104, 32 + 58 + 106, 32 + 59 + 65, 32 + 59 + 67, 32 + 59 + 68, 32 + 59 + 103,
32 + 59 + 104, 32 + 59 + 106, 32 + 65 + 67, 32 + 65 + 68, 32 + 65 + 103, 32 + 65 + 104, 32 +
65 + 106, 32 + 67 + 68, 32 + 67 + 103, 32 + 67 + 104, 32 + 67 + 106, 32 + 68 + 103, 32 + 68 +
104, 32 + 68 + 106, 32 + 103 + 104, 32 + 103 + 106, 32 + 104 + 106, 53 + 54 + 57, 53 + 54 +
58, 53 + 54 + 59, 53 + 54 + 65, 53 + 54 + 67, 53 + 54 + 68, 53 + 54 + 103, 53 + 54 + 104,
53 + 54 + 106, 53 + 57 + 58, 53 + 57 + 59, 53 + 57 + 65, 53 + 57 + 67, 53 + 57 + 68, 53 + 57 +
103, 53 + 57 + 104, 53 + 57 + 106, 53 + 58 + 59, 53 + 58 + 65, 53 + 58 + 67, 53 + 58 + 68,
53 + 58 + 103, 53 + 58 + 104, 53 + 58 + 106, 53 + 59 + 65, 53 + 59 + 67, 53 + 59 + 68, 53 +
59 + 103, 53 + 59 + 104, 53 + 59 + 106, 53 + 65 + 67, 53 + 65 + 68, 53 + 65 + 103, 53 + 65 +
104, 53 + 65 + 106, 53 + 67 + 68, 53 + 67 + 103, 53 + 67 + 104, 53 + 67 + 106, 53 + 68 + 103,
53 + 68 + 104, 53 + 68 + 106, 53 + 103 + 104, 53 + 103 + 106, 53 + 104 + 106, 54 + 57 + 58,
54 + 57 + 59, 54 + 57 + 65, 54 + 57 + 67, 54 + 57 + 68, 54 + 57 + 103, 54 + 57 + 104, 54 + 57 +
106, 54 + 58 + 59, 54 + 58 + 65, 54 + 58 + 67, 54 + 58 + 68, 54 + 58 + 103, 54 + 58 + 104,
54 + 58 + 106, 54 + 59 + 65, 54 + 59 + 67, 54 + 59 + 68, 54 + 59 + 103, 54 + 59 + 104, 54 +
59 + 106, 54 + 65 + 67, 54 + 65 + 68, 54 + 65 + 103, 54 + 65 + 104, 54 + 65 + 106, 54 + 67 +
68, 54 + 67 + 103, 54 + 67 + 104, 54 + 67 + 106, 54 + 68 + 103, 54 + 68 + 104, 54 + 68 + 106,
54 + 103 + 104, 54 + 103 + 106, 54 + 104 + 106, 57 + 58 + 59, 57 + 58 + 65, 57 + 58 + 67, 57 +
58 + 68, 57 + 58 + 103, 57 + 58 + 104, 57 + 58 + 106, 57 + 59 + 65, 57 + 59 + 67, 57 + 59 +
68, 57 + 59 + 103, 57 + 59 + 104, 57 + 59 + 106, 57 + 65 + 67, 57 + 65 + 68, 57 + 65 + 103,
57 + 65 + 104, 57 + 65 + 106, 57 + 67 + 68, 57 + 67 + 103, 57 + 67 + 104, 57 + 67 + 106, 57 +
68 + 103, 57 + 68 + 104, 57 + 68 + 106, 57 + 103 + 104, 57 + 103 + 106, 57 + 104 + 106, 58 +
59 + 65, 58 + 59 + 67, 58 + 59 + 68, 58 + 59 + 103, 58 + 59 + 104, 58 + 59 + 106, 58 + 65 +
67, 58 + 65 + 68, 58 + 65 + 103, 58 + 65 + 104, 58 + 65 + 106, 58 + 67 + 68, 58 + 67 + 103,
58 + 67 + 104, 58 + 67 + 106, 58 + 68 + 103, 58 + 68 + 104, 58 + 68 + 106, 58 + 103 + 104,
58 + 103 + 106, 58 + 104 + 106, 59 + 65 + 67, 59 + 65 + 68, 59 + 65 + 103, 59 + 65 + 104, 59 +
65 + 106, 59 + 67 + 68, 59 + 67 + 103, 59 + 67 + 104, 59 + 67 + 106, 59 + 68 + 103, 59 +
68 + 104, 59 + 68 + 106, 59 + 103 + 104, 59 + 103 + 106, 59 + 104 + 106, 65 + 67 + 68, 65 +
67 + 103, 65 + 67 + 104, 65 + 67 + 106, 65 + 68 + 103, 65 + 68 + 104, 65 + 68 + 106, 65 +
103 + 104, 65 + 103 + 106, 65 + 104 + 106, 67 + 68 + 103, 67 + 68 + 104, 67 + 68 + 106, 67 +
103 + 104, 67 + 103 + 106, 67 + 104 + 106, 68 + 103 + 104, 68 + 103 + 106, 68 + 104 + 106,
103 + 104 + 106

[0594] In some examples of any of the ABPCs described herein, a light chain variable domain includes a light chain variable domain that is at least 90% (e.g., at least 92%, at least 94%, at least 96%, at least 98%, at least 99%, or 100%) identical to SEQ ID NO: 538, where the light chain variable domain includes a histidine at any of the specific combinations of one or more amino acid positions in SEQ ID NO: 538 listed in Table 14.

TABLE 14
Exemplary Combinations of Amino Acid Positions in SEQ
ID NO: 538 that can be substituted with histidine

28 + 34, 28 + 53, 28 + 93, 28 + 94, 28 + 98, 34 + 53, 34 + 93, 34 + 94, 34 + 98, 53 + 93, 53 +
94, 53 + 98, 93 + 94, 93 + 98, 94 + 98, 28 + 34 + 53, 28 + 34 + 93, 28 + 34 + 94, 28 + 34 +
98, 28 + 53 + 93, 28 + 53 + 94, 28 + 53 + 98, 28 + 93 + 94, 28 + 93 + 98, 28 + 94 + 98, 34 +
53 + 93, 34 + 53 + 94, 34 + 53 + 98, 34 + 93 + 94, 34 + 93 + 98, 34 + 94 + 98, 53 + 93 + 94,
53 + 93 + 98, 53 + 94 + 98, 93 + 94 + 98

[0595] In some examples of any of the ABPCs described herein, the first antigen-binding domain includes a heavy chain variable domain that is at least 90% (e.g., at least 92%, at least 94%, at least 96%, at least 98%, at least 99%, or 100%) identical to SEQ ID NO: 537, where the heavy chain variable domain includes a histidine at any of the specific combinations of one or more amino acid positions in SEQ ID NO: 537 listed in Table 13; and a light chain variable domain that that is at least 90% (e.g., at least 92%, at least 94%, at least 96%, at least 98%, at least 99%, or 100%) identical to SEQ ID NO: 538, where the light chain variable domain includes a histidine at any of the specific combinations of one or more amino acid positions in SEQ ID NO: 538 listed in Table 14.

[0596] In some examples of any of the ABPCs described herein, the first antigen-binding domain comprises a light chain variable domain that is at least 90% identical to SEQ ID NO: 538, wherein the light chain variable domain includes a histidine at position 28 in SEQ ID NO: 538; and a heavy chain variable domain that is at least 90% (e.g., at least 92%, at least 94%, at least 96%, at least 98%, at least 99%, or 100%) identical to SEQ ID NO: 538, where the heavy chain variable domain includes a histidine at any of the specific combinations of one or more amino acid positions in SEQ ID NO: 537 listed in Table 13.

[0597] In some examples of any of the ABPCs described herein, the first antigen-binding domain comprises a light chain variable domain comprising SEQ ID NO: 538, and a heavy chain variable domain that is at least 90% identical (e.g., at least 92%, at least 94%, at least 96%, at least 98%, at least 99%, or 100%) identical to SEQ ID NO: 538, where the heavy chain variable domain includes a histidine at any of the specific combinations of one or more (e.g., two, three, four, five, six, seven, eight, nine, or ten) amino acid positions in SEQ ID NO: 537 listed in Table 13.

[0598] In some examples of any of the ABPCs described herein, the first antigen-binding domain comprises a light chain variable domain that is at least 90% identical to SEQ ID NO: 538, wherein the light chain variable domain includes a histidine at position 34 in SEQ ID NO: 538; and a heavy chain variable domain that is at least 90% (e.g., at least 92%, at least 94%, at least 96%, at least 98%, at least 99%, or 100%) identical to SEQ ID NO: 538, where the heavy chain variable domain includes a histidine at any of the specific combinations of one or more amino acid positions in SEQ ID NO: 537 listed in Table 13.

[0599] In some examples of any of the ABPCs described herein, the first antigen-binding domain comprises a light chain variable domain that is at least 90% identical to SEQ ID NO: 538, wherein the light chain variable domain includes a histidine at position 53 in SEQ ID NO: 538; and a heavy chain variable domain that is at least 90% (e.g., at least 92%, at least 94%, at least 96%, at least 98%, at least 99%, or 100%) identical to SEQ ID NO: 538, where the heavy chain variable domain includes a histidine at any of the specific combinations of one or more amino acid positions in SEQ ID NO: 537 listed in Table 13.

[0600] In some examples of any of the ABPCs described herein, the first antigen-binding domain comprises a light chain variable domain that is at least 90% identical to SEQ ID NO: 538, wherein the light chain variable domain includes a histidine at position 93 in SEQ ID NO: 538; and a heavy chain variable domain that is at least 90% (e.g., at least 92%, at least 94%, at least 96%, at least 98%, at least 99%, or 100%) identical to SEQ ID NO: 538, where the heavy chain variable domain includes a histidine at any of the specific combinations of one or more amino acid positions in SEQ ID NO: 537 listed in Table 13.

[0601] In some examples of any of the ABPCs described herein, the first antigen-binding domain comprises a light chain variable domain that is at least 90% identical to SEQ ID NO: 538, wherein the light chain variable domain includes a histidine at position 94 in SEQ ID NO: 538; and a heavy chain variable domain that is at least 90% (e.g., at least 92%, at least 94%, at least 96%, at least 98%, at least 99%, or 100%) identical to SEQ ID NO: 538, where the heavy chain variable domain includes a histidine at any of the specific combinations of one or more amino acid positions in SEQ ID NO: 537 listed in Table 13.

[0602] In some examples of any of the ABPCs described herein, the first antigen-binding domain comprises a light chain variable domain that is at least 90% identical to SEQ ID NO: 538, wherein the light chain variable domain includes a histidine at position 98 in SEQ ID NO: 538; and a heavy chain variable domain that is at least 90% (e.g., at least 92%, at least 94%, at least 96%, at least 98%, at least 99%, or 100%) identical to SEQ ID NO: 538, where the heavy chain variable domain includes a histidine at any of the specific combinations of one or more amino acid positions in SEQ ID NO: 537 listed in Table 13.

[0603] In some examples of any of the ABPCs described herein, the first antigen-binding domain includes a heavy chain variable domain of SC16.67 with one or more (e.g., one, two, three, four, five, six, seven, eight, nine, ten, eleven, twelve, thirteen, fourteen, fifteen, sixteen, seventeen, eighteen, nineteen, or twenty) histidine(s) substituted with an alanine. In some examples of any of the ABPCs described herein, the first antigen-binding domain includes a light chain variable domain of SC16.67 with one or more (e.g., one, two, three, four, five, six, seven, eight, nine, ten, eleven, twelve, thirteen, fourteen, fifteen, sixteen, seventeen, eighteen, nineteen, or twenty) histidine(s) substituted with an alanine. In some examples of any of the ABPCs described herein, the first antigen-binding domain includes a heavy chain variable domain SC16.67 with one or more (e.g., one, two, three, four, five, six, seven, eight, nine, ten, eleven, twelve, thirteen, fourteen, fifteen, sixteen, seventeen, eighteen, nineteen, or twenty) histidines substituted with an alanine; and a light chain variable domain of SC16.67 with one or more (e.g., one, two, three, four, five, six, seven, eight, nine, ten, eleven, twelve, thirteen, fourteen, fifteen, sixteen, seventeen, eighteen, nineteen, or twenty) histidine(s) substituted with an alanine. In some examples of any of the ABPCs described herein, the heavy chain variable domain of SC16.67 comprises SEQ ID NO: 537. In some examples of any of the ABPCs described herein, the light chain variable domain of SC16.67 comprises SEQ ID NO: 538.

[0604] In some examples of any of the ABPCs described herein, the first antigen-binding domain comprises a heavy chain variable domain comprising a CDR1, a CDR2, and a CDR3 of SEQ ID NO: 652, SEQ ID NO: 653, and SEQ ID NO: 654, respectively, with collectively a total of one or more (e.g., one, two, three, four, five, six, seven, eight, nine, or ten) histidine(s) in SEQ ID NOs: 652-654 substituted with an alanine. In some examples of any of the ABPCs described herein, the first antigen-binding domain comprises a light chain variable domain comprising a CDR1, a CDR2, and a CDR3 of SEQ ID NO: 655, SEQ ID NO: 656, and SEQ ID NO: 657, respectively, with collectively a total of one or more (e.g., one, two, three, four, five, six, seven, eight, nine, or ten) histidine(s) in SEQ ID NOs: 655-657 substituted with an alanine. In some examples of any of the ABPCs described herein, the first antigen-binding domain includes: a heavy chain variable domain comprising a CDR1, a CDR2, and a CDR3 of SEQ ID NO: 652, SEQ ID NO: 653, and SEQ ID NO: 654, respectively, with collectively a total of one or more (e.g., one, two, three, four, five, six, seven, eight, nine, or ten) histidine(s) in SEQ ID NOs: 652-654 substituted with an alanine; and a light chain variable domain comprising a CDR1, a CDR2, and a CDR3 of SEQ ID NO: 655, SEQ ID NO: 656, and SEQ ID NO: 657, respectively, with collectively a total of one or more (e.g., one, two, three, four, five, six, seven, eight, nine, or ten) histidine(s) in SEQ ID NOs: 655-657 substituted with an alanine.

[0605] In some examples of any of the ABPCs described herein, the first antigen-binding domain comprises a heavy chain variable domain of SEQ ID NO: 537, SEQ ID NO: 539, SEQ ID NO: 540, SEQ ID NO: 541, SEQ ID NO: 542, SEQ ID NO: 543, SEQ ID NO: 544, SEQ ID NO: 545, SEQ ID NO: 546, SEQ ID NO: 547, SEQ ID NO: 548, SEQ ID NO: 549, SEQ ID NO: 550, SEQ ID NO: 551, SEQ ID NO: 552, SEQ ID NO: 553, SEQ ID NO: 554, SEQ ID NO: 555, SEQ ID NO: 556, SEQ ID NO: 557, SEQ ID NO: 558, SEQ ID NO: 559, SEQ ID NO: 560, SEQ ID NO: 561, SEQ ID NO: 562, SEQ ID NO: 563, SEQ ID NO: 564, SEQ ID NO: 565, SEQ ID NO: 566, SEQ ID NO: 567, SEQ ID NO: 568, SEQ ID NO: 569, SEQ ID NO: 570, SEQ ID NO: 571, SEQ ID NO: 572, SEQ ID NO: 573, SEQ ID NO: 574, or SEQ ID NO: 575.

[0606] In some examples of any of the ABPCs described herein, the first antigen-binding domain includes a light chain variable domain of SEQ ID NO: 538, SEQ ID NO: 576, SEQ ID NO: 577, SEQ ID NO: 578, SEQ ID NO: 579, SEQ ID NO: 580, SEQ ID NO: 581, SEQ ID NO: 582, SEQ ID NO: 583, SEQ ID NO: 584, SEQ ID NO: 585, SEQ ID NO: 586, SEQ ID NO: 587, SEQ ID NO: 588, SEQ ID NO: 589, SEQ ID NO: 590, SEQ ID NO: 591, SEQ ID NO: 592, SEQ ID NO: 593, SEQ ID NO: 594, SEQ ID NO: 595, SEQ ID NO: 596, SEQ ID NO: 597, SEQ ID NO: 598, SEQ ID NO: 599, SEQ ID NO: 600, SEQ ID NO: 601, SEQ ID NO: 602, SEQ ID NO: 603, SEQ ID NO: 604, or SEQ ID NO: 605.

[0607] In some examples of any of the ABPCs described herein, the first antigen-binding domain includes a light chain variable domain comprising SEQ ID NO: 538, and a heavy chain variable domain comprising SEQ ID NO: 537, SEQ ID NO: 539, SEQ ID NO: 540, SEQ ID NO: 541, SEQ ID NO: 542, SEQ ID NO: 543, SEQ ID NO: 544, SEQ ID NO: 545, SEQ ID NO: 546, SEQ ID NO: 547, SEQ ID NO: 548, SEQ ID NO: 549, SEQ ID NO: 550, SEQ ID NO: 551, SEQ ID NO: 552, SEQ ID NO: 553, SEQ ID NO: 554, SEQ ID NO: 555, SEQ ID NO: 556, SEQ ID NO: 557, SEQ ID NO: 558, SEQ ID NO: 559, SEQ ID NO: 560, SEQ ID NO: 561, SEQ ID NO: 562, SEQ ID NO: 563, SEQ ID NO: 564, SEQ ID NO: 565, SEQ ID NO: 566, SEQ ID NO: 567, SEQ ID NO: 568, SEQ ID NO: 569, SEQ ID NO: 570, SEQ ID NO: 571, SEQ ID NO: 572, SEQ ID NO: 573, SEQ ID NO: 574, or SEQ ID NO: 575.

[0608] In some examples of any of the ABPCs described herein, the first antigen-binding domain includes a light chain variable domain comprising SEQ ID NO: 576, and a heavy chain variable domain comprising SEQ ID NO: 537, SEQ ID NO: 539, SEQ ID NO: 540, SEQ ID NO: 541, SEQ ID NO: 542, SEQ ID NO: 543, SEQ ID NO: 544, SEQ ID NO: 545, SEQ ID NO: 546, SEQ ID NO: 547, SEQ ID NO: 548, SEQ ID NO: 549, SEQ ID NO: 550, SEQ ID NO: 551, SEQ ID NO: 552, SEQ ID NO: 553, SEQ ID NO: 554, SEQ ID NO: 555, SEQ ID NO: 556, SEQ ID NO: 557, SEQ ID NO: 558, SEQ ID NO: 559, SEQ ID NO: 560, SEQ ID NO: 561, SEQ ID NO: 562, SEQ ID NO: 563, SEQ ID NO: 564, SEQ ID NO: 565, SEQ ID NO: 566, SEQ ID NO: 567, SEQ ID NO: 568, SEQ ID NO: 569, SEQ ID NO: 570, SEQ ID NO: 571, SEQ ID NO: 572, SEQ ID NO: 573, SEQ ID NO: 574, or SEQ ID NO: 575.

[0609] In some examples of any of the ABPCs described herein, the first antigen-binding domain includes a light chain variable domain comprising SEQ ID NO: 577, and a heavy chain variable domain comprising SEQ ID NO: 537, SEQ ID NO: 539, SEQ ID NO: 540, SEQ ID NO: 541, SEQ ID NO: 542, SEQ ID NO: 543, SEQ ID NO: 544, SEQ ID NO: 545, SEQ ID NO: 546, SEQ ID NO: 547, SEQ ID NO: 548, SEQ ID NO: 549, SEQ ID NO: 550, SEQ ID NO: 551, SEQ ID NO: 552, SEQ ID NO: 553, SEQ ID NO: 554, SEQ ID NO: 555, SEQ ID NO: 556, SEQ ID NO: 557, SEQ ID NO: 558, SEQ ID NO: 559, SEQ ID NO: 560, SEQ ID NO: 561, SEQ ID NO: 562, SEQ ID NO: 563, SEQ ID NO: 564, SEQ ID NO: 565, SEQ ID NO: 566, SEQ ID NO: 567, SEQ ID NO: 568, SEQ ID NO: 569, SEQ ID NO: 570, SEQ ID NO: 571, SEQ ID NO: 572, SEQ ID NO: 573, SEQ ID NO: 574, or SEQ ID NO: 575.

[0610] In some examples of any of the ABPCs described herein, the first antigen-binding domain includes a light chain variable domain comprising SEQ ID NO: 578, and a heavy chain variable domain comprising SEQ ID NO: 537, SEQ ID NO: 539, SEQ ID NO: 540, SEQ ID NO: 541, SEQ ID NO: 542, SEQ ID NO: 543, SEQ ID NO: 544, SEQ ID NO: 545, SEQ ID NO: 546, SEQ ID NO: 547, SEQ ID NO: 548, SEQ ID NO: 549, SEQ ID NO: 550, SEQ ID NO: 551, SEQ ID NO: 552, SEQ ID NO: 553, SEQ ID NO: 554, SEQ ID NO: 555, SEQ ID NO: 556, SEQ ID NO: 557, SEQ ID NO: 558, SEQ ID NO: 559, SEQ ID NO: 560, SEQ ID NO: 561, SEQ ID NO: 562, SEQ ID NO: 563, SEQ ID NO: 564, SEQ ID NO: 565, SEQ ID NO: 566, SEQ ID NO: 567, SEQ ID NO: 568, SEQ ID NO: 569, SEQ ID NO: 570, SEQ ID NO: 571, SEQ ID NO: 572, SEQ ID NO: 573, SEQ ID NO: 574, or SEQ ID NO: 575.

[0611] In some examples of any of the ABPCs described herein, the first antigen-binding domain includes a light chain variable domain comprising SEQ ID NO: 579, and a heavy chain variable domain comprising SEQ ID NO: 537, SEQ ID NO: 539, SEQ ID NO: 540, SEQ ID NO: 541, SEQ ID NO: 542, SEQ ID NO: 543, SEQ ID NO: 544, SEQ ID NO: 545, SEQ ID NO: 546, SEQ ID NO: 547, SEQ ID NO: 548, SEQ ID NO: 549, SEQ ID NO: 550, SEQ ID NO: 551, SEQ ID NO: 552, SEQ ID NO: 553, SEQ ID NO: 554, SEQ ID NO: 555, SEQ ID NO: 556, SEQ ID NO: 557, SEQ ID NO: 558, SEQ ID NO: 559, SEQ ID NO: 560, SEQ ID NO: 561, SEQ ID NO: 562, SEQ ID NO: 563, SEQ ID NO: 564, SEQ ID NO: 565, SEQ ID NO: 566, SEQ ID NO: 567, SEQ ID NO: 568, SEQ ID NO: 569, SEQ ID NO: 570, SEQ ID NO: 571, SEQ ID NO: 572, SEQ ID NO: 573, SEQ ID NO: 574, or SEQ ID NO: 575.

[0612] In some examples of any of the ABPCs described herein, the first antigen-binding domain includes a light chain variable domain comprising SEQ ID NO: 580, and a heavy chain variable domain comprising SEQ ID NO: 537, SEQ ID NO: 539, SEQ ID NO: 540, SEQ ID NO: 541, SEQ ID NO: 542, SEQ ID NO: 543, SEQ ID NO: 544, SEQ ID NO: 545, SEQ ID NO: 546, SEQ ID NO: 547, SEQ ID NO: 548, SEQ ID NO: 549, SEQ ID NO: 550, SEQ ID NO: 551, SEQ ID NO: 552, SEQ ID NO: 553, SEQ ID NO: 554, SEQ ID NO: 555, SEQ ID NO: 556, SEQ ID NO: 557, SEQ ID NO: 558, SEQ ID NO: 559, SEQ ID NO: 560, SEQ ID NO: 561, SEQ ID NO: 562, SEQ ID NO: 563, SEQ ID NO: 564, SEQ ID NO: 565, SEQ ID NO: 566, SEQ ID NO: 567, SEQ ID NO: 568, SEQ ID NO: 569, SEQ ID NO: 570, SEQ ID NO: 571, SEQ ID NO: 572, SEQ ID NO: 573, SEQ ID NO: 574, or SEQ ID NO: 575.

[0613] In some examples of any of the ABPCs described herein, the first antigen-binding domain includes a light chain variable domain comprising SEQ ID NO: 581, and a heavy chain variable domain comprising SEQ ID NO: 537, SEQ ID NO: 539, SEQ ID NO: 540, SEQ ID NO: 541, SEQ ID NO: 542, SEQ ID NO: 543, SEQ ID NO: 544, SEQ ID NO: 545, SEQ ID NO: 546, SEQ ID NO: 547, SEQ ID NO: 548, SEQ ID NO: 549, SEQ ID NO: 550, SEQ ID NO: 551, SEQ ID NO: 552, SEQ ID NO: 553, SEQ ID NO: 554, SEQ ID NO: 555, SEQ ID NO: 556, SEQ ID NO: 557, SEQ ID NO: 558, SEQ ID NO: 559, SEQ ID NO: 560, SEQ ID NO: 561, SEQ ID NO: 562, SEQ ID NO: 563, SEQ ID NO: 564, SEQ ID NO: 565, SEQ ID NO: 566, SEQ ID NO: 567, SEQ ID NO: 568, SEQ ID NO: 569, SEQ ID NO: 570, SEQ ID NO: 571, SEQ ID NO: 572, SEQ ID NO: 573, SEQ ID NO: 574, or SEQ ID NO: 575.

[0614] In some examples of any of the ABPCs described herein, the first antigen-binding domain includes a light chain variable domain comprising SEQ ID NO: 582, and a heavy chain variable domain comprising SEQ ID NO: 537, SEQ ID NO: 539, SEQ ID NO: 540, SEQ ID NO: 541, SEQ ID NO: 542, SEQ ID NO: 543, SEQ ID NO: 544, SEQ ID NO: 545, SEQ ID NO: 546, SEQ ID NO: 547, SEQ ID NO: 548, SEQ ID NO: 549, SEQ ID NO: 550, SEQ ID NO: 551, SEQ ID NO: 552, SEQ ID NO: 553, SEQ ID NO: 554, SEQ ID NO: 555, SEQ ID NO: 556, SEQ ID NO: 557, SEQ ID NO: 558, SEQ ID NO: 559, SEQ ID NO: 560, SEQ ID NO: 561, SEQ ID NO: 562, SEQ ID NO: 563, SEQ ID NO: 564, SEQ ID NO: 565, SEQ ID NO: 566, SEQ ID NO: 567, SEQ ID NO: 568, SEQ ID NO: 569, SEQ ID NO: 570, SEQ ID NO: 571, SEQ ID NO: 572, SEQ ID NO: 573, SEQ ID NO: 574, or SEQ ID NO: 575.

[0615] In some examples of any of the ABPCs described herein, the first antigen-binding domain includes a light chain variable domain comprising SEQ ID NO: 583, and a heavy chain variable domain comprising SEQ ID NO: 537, SEQ ID NO: 539, SEQ ID NO: 540, SEQ ID NO: 541, SEQ ID NO: 542, SEQ ID NO: 543, SEQ ID NO: 544, SEQ ID NO: 545, SEQ ID NO: 546, SEQ ID NO: 547, SEQ ID NO: 548, SEQ ID NO: 549, SEQ ID NO: 550, SEQ ID NO: 551, SEQ ID NO: 552, SEQ ID NO: 553, SEQ ID NO: 554, SEQ ID NO: 555, SEQ ID NO: 556, SEQ ID NO: 557, SEQ ID NO: 558, SEQ ID NO: 559, SEQ ID NO: 560, SEQ ID NO: 561, SEQ ID NO: 562, SEQ ID NO: 563, SEQ ID NO: 564, SEQ ID NO: 565, SEQ ID NO: 566, SEQ ID NO: 567, SEQ ID NO: 568, SEQ ID NO: 569, SEQ ID NO: 570, SEQ ID NO: 571, SEQ ID NO: 572, SEQ ID NO: 573, SEQ ID NO: 574, or SEQ ID NO: 575.

[0616] In some examples of any of the ABPCs described herein, the first antigen-binding domain includes a light chain variable domain comprising SEQ ID NO: 584, and a heavy chain variable domain comprising SEQ ID NO: 537, SEQ ID NO: 539, SEQ ID NO: 540, SEQ ID NO: 541, SEQ ID NO: 542, SEQ ID NO: 543, SEQ ID NO: 544, SEQ ID NO: 545, SEQ ID NO: 546, SEQ ID NO: 547, SEQ ID NO: 548, SEQ ID NO: 549, SEQ ID NO: 550, SEQ ID NO: 551, SEQ ID NO: 552, SEQ ID NO: 553, SEQ ID NO: 554, SEQ ID NO: 555, SEQ ID NO: 556, SEQ ID NO: 557, SEQ ID NO: 558, SEQ ID NO: 559, SEQ ID NO: 560, SEQ ID NO: 561, SEQ ID NO: 562, SEQ ID NO: 563, SEQ ID NO: 564, SEQ ID NO: 565, SEQ ID NO: 566, SEQ ID NO: 567, SEQ ID NO: 568, SEQ ID NO: 569, SEQ ID NO: 570, SEQ ID NO: 571, SEQ ID NO: 572, SEQ ID NO: 573, SEQ ID NO: 574, or SEQ ID NO: 575.

[0617] In some examples of any of the ABPCs described herein, the first antigen-binding domain includes a light chain variable domain comprising SEQ ID NO: 585, and a heavy chain variable domain comprising SEQ ID NO: 537, SEQ ID NO: 539, SEQ ID NO: 540, SEQ ID NO: 541, SEQ ID NO: 542, SEQ ID NO: 543, SEQ ID NO: 544, SEQ ID NO: 545, SEQ ID NO: 546, SEQ ID NO: 547, SEQ ID NO: 548, SEQ ID NO: 549, SEQ ID NO: 550, SEQ ID NO: 551, SEQ ID NO: 552, SEQ ID NO: 553, SEQ ID NO: 554, SEQ ID NO: 555, SEQ ID NO: 556, SEQ ID NO: 557, SEQ ID NO: 558, SEQ ID NO: 559, SEQ ID NO: 560, SEQ ID NO: 561, SEQ ID NO: 562, SEQ ID NO: 563, SEQ ID NO: 564, SEQ ID NO: 565, SEQ ID NO: 566, SEQ ID NO: 567, SEQ ID NO: 568, SEQ ID NO: 569, SEQ ID NO: 570, SEQ ID NO: 571, SEQ ID NO: 572, SEQ ID NO: 573, SEQ ID NO: 574, or SEQ ID NO: 575.

[0618] In some examples of any of the ABPCs described herein, the first antigen-binding domain includes a light chain variable domain comprising SEQ ID NO: 586, and a heavy chain variable domain comprising SEQ ID NO: 537, SEQ ID NO: 539, SEQ ID NO: 540, SEQ ID NO: 541, SEQ ID NO: 542, SEQ ID NO: 543, SEQ ID NO: 544, SEQ ID NO: 545, SEQ ID NO: 546, SEQ ID NO: 547, SEQ ID NO: 548, SEQ ID NO: 549, SEQ ID NO: 550, SEQ ID NO: 551, SEQ ID NO: 552, SEQ ID NO: 553, SEQ ID NO: 554, SEQ ID NO: 555, SEQ ID NO: 556, SEQ ID NO: 557, SEQ ID NO: 558, SEQ ID NO: 559, SEQ ID NO: 560, SEQ ID NO: 561, SEQ ID NO: 562, SEQ ID NO: 563, SEQ ID NO: 564, SEQ ID NO: 565, SEQ ID NO: 566, SEQ ID NO: 567, SEQ ID NO: 568, SEQ ID NO: 569, SEQ ID NO: 570, SEQ ID NO: 571, SEQ ID NO: 572, SEQ ID NO: 573, SEQ ID NO: 574, or SEQ ID NO: 575.

[0619] In some examples of any of the ABPCs described herein, the first antigen-binding domain includes a light chain variable domain comprising SEQ ID NO: 587, and a heavy chain variable domain comprising SEQ ID NO: 537, SEQ ID NO: 539, SEQ ID NO: 540, SEQ ID NO: 541, SEQ ID NO: 542, SEQ ID NO: 543, SEQ ID NO: 544, SEQ ID NO: 545, SEQ ID NO: 546, SEQ ID NO: 547, SEQ ID NO: 548, SEQ ID NO: 549, SEQ ID NO: 550, SEQ ID NO: 551, SEQ ID NO: 552, SEQ ID NO: 553, SEQ ID NO: 554, SEQ ID NO: 555, SEQ ID NO: 556, SEQ ID NO: 557, SEQ ID NO: 558, SEQ ID NO: 559, SEQ ID NO: 560, SEQ ID NO: 561, SEQ ID NO: 562, SEQ ID NO: 563, SEQ ID NO: 564, SEQ ID NO: 565, SEQ ID NO: 566, SEQ ID NO: 567, SEQ ID NO: 568, SEQ ID NO: 569, SEQ ID NO: 570, SEQ ID NO: 571, SEQ ID NO: 572, SEQ ID NO: 573, SEQ ID NO: 574, or SEQ ID NO: 575.

[0620] In some examples of any of the ABPCs described herein, the first antigen-binding domain includes a light chain variable domain comprising SEQ ID NO: 588, and a heavy chain variable domain comprising SEQ ID NO: 537, SEQ ID NO: 539, SEQ ID NO: 540, SEQ ID NO: 541, SEQ ID NO: 542, SEQ ID NO: 543, SEQ ID NO: 544, SEQ ID NO: 545, SEQ ID NO: 546, SEQ ID NO: 547, SEQ ID NO: 548, SEQ ID NO: 549, SEQ ID NO: 550, SEQ ID NO: 551, SEQ ID NO: 552, SEQ ID NO: 553, SEQ ID NO: 554, SEQ ID NO: 555, SEQ ID NO: 556, SEQ ID NO: 557, SEQ ID NO: 558, SEQ ID NO: 559, SEQ ID NO: 560, SEQ ID NO: 561, SEQ ID NO: 562, SEQ ID NO: 563, SEQ ID NO: 564, SEQ ID NO: 565, SEQ ID NO: 566, SEQ ID NO: 567, SEQ ID NO: 568, SEQ ID NO: 569, SEQ ID NO: 570, SEQ ID NO: 571, SEQ ID NO: 572, SEQ ID NO: 573, SEQ ID NO: 574, or SEQ ID NO: 575.

[0621] In some examples of any of the ABPCs described herein, the first antigen-binding domain includes a light chain variable domain comprising SEQ ID NO: 589, and a heavy chain variable domain comprising SEQ ID NO: 537, SEQ ID NO: 539, SEQ ID NO: 540, SEQ ID NO: 541, SEQ ID NO: 542, SEQ ID NO: 543, SEQ ID NO: 544, SEQ ID NO: 545, SEQ ID NO: 546, SEQ ID NO: 547, SEQ ID NO: 548, SEQ ID NO: 549, SEQ ID NO: 550, SEQ ID NO: 551, SEQ ID NO: 552, SEQ ID NO: 553, SEQ ID NO: 554, SEQ ID NO: 555, SEQ ID NO: 556, SEQ ID NO: 557, SEQ ID NO: 558, SEQ ID NO: 559, SEQ ID NO: 560, SEQ ID NO: 561, SEQ ID NO: 562, SEQ ID NO: 563, SEQ ID NO: 564, SEQ ID NO: 565, SEQ ID NO: 566, SEQ ID NO: 567, SEQ ID NO: 568, SEQ ID NO: 569, SEQ ID NO: 570, SEQ ID NO: 571, SEQ ID NO: 572, SEQ ID NO: 573, SEQ ID NO: 574, or SEQ ID NO: 575.

[0622] In some examples of any of the ABPCs described herein, the first antigen-binding domain includes a light chain variable domain comprising SEQ ID NO: 590, and a heavy chain variable domain comprising SEQ ID NO: 537, SEQ ID NO: 539, SEQ ID NO: 540, SEQ ID NO: 541, SEQ ID NO: 542, SEQ ID NO: 543, SEQ ID NO: 544, SEQ ID NO: 545, SEQ ID NO: 546, SEQ ID NO: 547, SEQ ID NO: 548, SEQ ID NO: 549, SEQ ID NO: 550, SEQ ID NO: 551, SEQ ID NO: 552, SEQ ID NO: 553, SEQ ID NO: 554, SEQ ID NO: 555, SEQ ID NO: 556, SEQ ID NO: 557, SEQ ID NO: 558, SEQ ID NO: 559, SEQ ID NO: 560, SEQ ID NO: 561, SEQ ID NO: 562, SEQ ID NO: 563, SEQ ID NO: 564, SEQ ID NO: 565, SEQ ID NO: 566, SEQ ID NO: 567, SEQ ID NO: 568, SEQ ID NO: 569, SEQ ID NO: 570, SEQ ID NO: 571, SEQ ID NO: 572, SEQ ID NO: 573, SEQ ID NO: 574, or SEQ ID NO: 575.

[0623] In some examples of any of the ABPCs described herein, the first antigen-binding domain includes a light chain variable domain comprising SEQ ID NO: 591, and a heavy chain variable domain comprising SEQ ID NO: 537, SEQ ID NO: 539, SEQ ID NO: 540, SEQ ID NO: 541, SEQ ID NO: 542, SEQ ID NO: 543, SEQ ID NO: 544, SEQ ID NO: 545, SEQ ID NO: 546, SEQ ID NO: 547, SEQ ID NO: 548, SEQ ID NO: 549, SEQ ID NO: 550, SEQ ID NO: 551, SEQ ID NO: 552, SEQ ID NO: 553, SEQ ID NO: 554, SEQ ID NO: 555, SEQ ID NO: 556, SEQ ID NO: 557, SEQ ID NO: 558, SEQ ID NO: 559, SEQ ID NO: 560, SEQ ID NO: 561, SEQ ID NO: 562, SEQ ID NO: 563, SEQ ID NO: 564, SEQ ID NO: 565, SEQ ID NO: 566, SEQ ID NO: 567, SEQ ID NO: 568, SEQ ID NO: 569, SEQ ID NO: 570, SEQ ID NO: 571, SEQ ID NO: 572, SEQ ID NO: 573, SEQ ID NO: 574, or SEQ ID NO: 575.

[0624] In some examples of any of the ABPCs described herein, the first antigen-binding domain includes a light chain variable domain comprising SEQ ID NO: 592, and a heavy chain variable domain comprising SEQ ID NO: 537, SEQ ID NO: 539, SEQ ID NO: 540, SEQ ID NO: 541, SEQ ID NO: 542, SEQ ID NO: 543, SEQ ID NO: 544, SEQ ID NO: 545, SEQ ID NO: 546, SEQ ID NO: 547, SEQ ID NO: 548, SEQ ID NO: 549, SEQ ID NO: 550, SEQ ID NO: 551, SEQ ID NO: 552, SEQ ID NO: 553, SEQ ID NO: 554, SEQ ID NO: 555, SEQ ID NO: 556, SEQ ID NO: 557, SEQ ID NO: 558, SEQ ID NO: 559, SEQ ID NO: 560, SEQ ID NO: 561, SEQ ID NO: 562, SEQ ID NO: 563, SEQ ID NO: 564, SEQ ID NO: 565, SEQ ID NO: 566, SEQ ID NO: 567, SEQ ID NO: 568, SEQ ID NO: 569, SEQ ID NO: 570, SEQ ID NO: 571, SEQ ID NO: 572, SEQ ID NO: 573, SEQ ID NO: 574, or SEQ ID NO: 575.

[0625] In some examples of any of the ABPCs described herein, the first antigen-binding domain includes a light chain variable domain comprising SEQ ID NO: 593, and a heavy chain variable domain comprising SEQ ID NO: 537, SEQ ID NO: 539, SEQ ID NO: 540, SEQ ID NO: 541, SEQ ID NO: 542, SEQ ID NO: 543, SEQ ID NO: 544, SEQ ID NO: 545, SEQ ID NO: 546, SEQ ID NO: 547, SEQ ID NO: 548, SEQ ID NO: 549, SEQ ID NO: 550, SEQ ID NO: 551, SEQ ID NO: 552, SEQ ID NO: 553, SEQ ID NO: 554, SEQ ID NO: 555, SEQ ID NO: 556, SEQ ID NO: 557, SEQ ID NO: 558, SEQ ID NO: 559, SEQ ID NO: 560, SEQ ID NO: 561, SEQ ID NO: 562, SEQ ID NO: 563, SEQ ID NO: 564, SEQ ID NO: 565, SEQ ID NO: 566, SEQ ID NO: 567, SEQ ID NO: 568, SEQ ID NO: 569, SEQ ID NO: 570, SEQ ID NO: 571, SEQ ID NO: 572, SEQ ID NO: 573, SEQ ID NO: 574, or SEQ ID NO: 575.

[0626] In some examples of any of the ABPCs described herein, the first antigen-binding domain includes a light chain variable domain comprising SEQ ID NO: 594, and a heavy chain variable domain comprising SEQ ID NO: 537, SEQ ID NO: 539, SEQ ID NO: 540, SEQ ID NO: 541, SEQ ID NO: 542, SEQ ID NO: 543, SEQ ID NO: 544, SEQ ID NO: 545, SEQ ID NO: 546, SEQ ID NO: 547, SEQ ID NO: 548, SEQ ID NO: 549, SEQ ID NO: 550, SEQ ID NO: 551, SEQ ID NO: 552, SEQ ID NO: 553, SEQ ID NO: 554, SEQ ID NO: 555, SEQ ID NO: 556, SEQ ID NO: 557, SEQ ID NO: 558, SEQ ID NO: 559, SEQ ID NO: 560, SEQ ID NO: 561, SEQ ID NO: 562, SEQ ID NO: 563, SEQ ID NO: 564, SEQ ID NO: 565, SEQ ID NO: 566, SEQ ID NO: 567, SEQ ID NO: 568, SEQ ID NO: 569, SEQ ID NO: 570, SEQ ID NO: 571, SEQ ID NO: 572, SEQ ID NO: 573, SEQ ID NO: 574, or SEQ ID NO: 575.

[0627] In some examples of any of the ABPCs described herein, the first antigen-binding domain includes a light chain variable domain comprising SEQ ID NO: 595, and a heavy chain variable domain comprising SEQ ID NO: 537, SEQ ID NO: 539, SEQ ID NO: 540, SEQ ID NO: 541, SEQ ID NO: 542, SEQ ID NO: 543, SEQ ID NO: 544, SEQ ID NO: 545, SEQ ID NO: 546, SEQ ID NO: 547, SEQ ID NO: 548, SEQ ID NO: 549, SEQ ID NO: 550, SEQ ID NO: 551, SEQ ID NO: 552, SEQ ID NO: 553, SEQ ID NO: 554, SEQ ID NO: 555, SEQ ID NO: 556, SEQ ID NO: 557, SEQ ID NO: 558, SEQ ID NO: 559, SEQ ID NO: 560, SEQ ID NO: 561, SEQ ID NO: 562, SEQ ID NO: 563, SEQ ID NO: 564, SEQ ID NO: 565, SEQ ID NO: 566, SEQ ID NO: 567, SEQ ID NO: 568, SEQ ID NO: 569, SEQ ID NO: 570, SEQ ID NO: 571, SEQ ID NO: 572, SEQ ID NO: 573, SEQ ID NO: 574, or SEQ ID NO: 575.

[0628] In some examples of any of the ABPCs described herein, the first antigen-binding domain includes a light chain variable domain comprising SEQ ID NO: 596, and a heavy chain variable domain comprising SEQ ID NO: 537, SEQ ID NO: 539, SEQ ID NO: 540, SEQ ID NO: 541, SEQ ID NO: 542, SEQ ID NO: 543, SEQ ID NO: 544, SEQ ID NO: 545, SEQ ID NO: 546, SEQ ID NO: 547, SEQ ID NO: 548, SEQ ID NO: 549, SEQ ID NO: 550, SEQ ID NO: 551, SEQ ID NO: 552, SEQ ID NO: 553, SEQ ID NO: 554, SEQ ID NO: 555, SEQ ID NO: 556, SEQ ID NO: 557, SEQ ID NO: 558, SEQ ID NO: 559, SEQ ID NO: 560, SEQ ID NO: 561, SEQ ID NO: 562, SEQ ID NO: 563, SEQ ID NO: 564, SEQ ID NO: 565, SEQ ID NO: 566, SEQ ID NO: 567, SEQ ID NO: 568, SEQ ID NO: 569, SEQ ID NO: 570, SEQ ID NO: 571, SEQ ID NO: 572, SEQ ID NO: 573, SEQ ID NO: 574, or SEQ ID NO: 575.

[0629] In some examples of any of the ABPCs described herein, the first antigen-binding domain includes a light chain variable domain comprising SEQ ID NO: 597, and a heavy chain variable domain comprising SEQ ID NO: 537, SEQ ID NO: 539, SEQ ID NO: 540, SEQ ID NO: 541, SEQ ID NO: 542, SEQ ID NO: 543, SEQ ID NO: 544, SEQ ID NO: 545, SEQ ID NO: 546, SEQ ID NO: 547, SEQ ID NO: 548, SEQ ID NO: 549, SEQ ID NO: 550, SEQ ID NO: 551, SEQ ID NO: 552, SEQ ID NO: 553, SEQ ID NO: 554, SEQ ID NO: 555, SEQ ID NO: 556, SEQ ID NO: 557, SEQ ID NO: 558, SEQ ID NO: 559, SEQ ID NO: 560, SEQ ID NO: 561, SEQ ID NO: 562, SEQ ID NO: 563, SEQ ID NO: 564, SEQ ID NO: 565, SEQ ID NO: 566, SEQ ID NO: 567, SEQ ID NO: 568, SEQ ID NO: 569, SEQ ID NO: 570, SEQ ID NO: 571, SEQ ID NO: 572, SEQ ID NO: 573, SEQ ID NO: 574, or SEQ ID NO: 575.

[0630] In some examples of any of the ABPCs described herein, the first antigen-binding domain includes a light chain variable domain comprising SEQ ID NO: 598, and a heavy chain variable domain comprising SEQ ID NO: 537, SEQ ID NO: 539, SEQ ID NO: 540, SEQ ID NO: 541, SEQ ID NO: 542, SEQ ID NO: 543, SEQ ID NO: 544, SEQ ID NO: 545, SEQ ID NO: 546, SEQ ID NO: 547, SEQ ID NO: 548, SEQ ID NO: 549, SEQ ID NO: 550, SEQ ID NO: 551, SEQ ID NO: 552, SEQ ID NO: 553, SEQ ID NO: 554, SEQ ID NO: 555, SEQ ID NO: 556, SEQ ID NO: 557, SEQ ID NO: 558, SEQ ID NO: 559, SEQ ID NO: 560, SEQ ID NO: 561, SEQ ID NO: 562, SEQ ID NO: 563, SEQ ID NO: 564, SEQ ID NO: 565, SEQ ID NO: 566, SEQ ID NO: 567, SEQ ID NO: 568, SEQ ID NO: 569, SEQ ID NO: 570, SEQ ID NO: 571, SEQ ID NO: 572, SEQ ID NO: 573, SEQ ID NO: 574, or SEQ ID NO: 575.

[0631] In some examples of any of the ABPCs described herein, the first antigen-binding domain includes a light chain variable domain comprising SEQ ID NO: 599, and a heavy chain variable domain comprising SEQ ID NO: 537, SEQ ID NO: 539, SEQ ID NO: 540, SEQ ID NO: 541, SEQ ID NO: 542, SEQ ID NO: 543, SEQ ID NO: 544, SEQ ID NO: 545, SEQ ID NO: 546, SEQ ID NO: 547, SEQ ID NO: 548, SEQ ID NO: 549, SEQ ID NO: 550, SEQ ID NO: 551, SEQ ID NO: 552, SEQ ID NO: 553, SEQ ID NO: 554, SEQ ID NO: 555, SEQ ID NO: 556, SEQ ID NO: 557, SEQ ID NO: 558, SEQ ID NO: 559, SEQ ID NO: 560, SEQ ID NO: 561, SEQ ID NO: 562, SEQ ID NO: 563, SEQ ID NO: 564, SEQ ID NO: 565, SEQ ID NO: 566, SEQ ID NO: 567, SEQ ID NO: 568, SEQ ID NO: 569, SEQ ID NO: 570, SEQ ID NO: 571, SEQ ID NO: 572, SEQ ID NO: 573, SEQ ID NO: 574, or SEQ ID NO: 575.

[0632] In some examples of any of the ABPCs described herein, the first antigen-binding domain includes a light chain variable domain comprising SEQ ID NO: 600, and a heavy chain variable domain comprising SEQ ID NO: 537, SEQ ID NO: 539, SEQ ID NO: 540, SEQ ID NO: 541, SEQ ID NO: 542, SEQ ID NO: 543, SEQ ID NO: 544, SEQ ID NO: 545, SEQ ID NO: 546, SEQ ID NO: 547, SEQ ID NO: 548, SEQ ID NO: 549, SEQ ID NO: 550, SEQ ID NO: 551, SEQ ID NO: 552, SEQ ID NO: 553, SEQ ID NO: 554, SEQ ID NO: 555, SEQ ID NO: 556, SEQ ID NO: 557, SEQ ID NO: 558, SEQ ID NO: 559, SEQ ID NO: 560, SEQ ID NO: 561, SEQ ID NO: 562, SEQ ID NO: 563, SEQ ID NO: 564, SEQ ID NO: 565, SEQ ID NO: 566, SEQ ID NO: 567, SEQ ID NO: 568, SEQ ID NO: 569, SEQ ID NO: 570, SEQ ID NO: 571, SEQ ID NO: 572, SEQ ID NO: 573, SEQ ID NO: 574, or SEQ ID NO: 575.

[0633] In some examples of any of the ABPCs described herein, the first antigen-binding domain includes a light chain variable domain comprising SEQ ID NO: 601, and a heavy chain variable domain comprising SEQ ID NO: 537, SEQ ID NO: 539, SEQ ID NO: 540, SEQ ID NO: 541, SEQ ID NO: 542, SEQ ID NO: 543, SEQ ID NO: 544, SEQ ID NO: 545, SEQ ID NO: 546, SEQ ID NO: 547, SEQ ID NO: 548, SEQ ID NO: 549, SEQ ID NO: 550, SEQ ID NO: 551, SEQ ID NO: 552, SEQ ID NO: 553, SEQ ID NO: 554, SEQ ID NO: 555, SEQ ID NO: 556, SEQ ID NO: 557, SEQ ID NO: 558, SEQ ID NO: 559, SEQ ID NO: 560, SEQ ID NO: 561, SEQ ID NO: 562, SEQ ID NO: 563, SEQ ID NO: 564, SEQ ID NO: 565, SEQ ID NO: 566, SEQ ID NO: 567, SEQ ID NO: 568, SEQ ID NO: 569, SEQ ID NO: 570, SEQ ID NO: 571, SEQ ID NO: 572, SEQ ID NO: 573, SEQ ID NO: 574, or SEQ ID NO: 575.

[0634] In some examples of any of the ABPCs described herein, the first antigen-binding domain includes a light chain variable domain comprising SEQ ID NO: 602, and a heavy chain variable domain comprising SEQ ID NO: 537, SEQ ID NO: 539, SEQ ID NO: 540, SEQ ID NO: 541, SEQ ID NO: 542, SEQ ID NO: 543, SEQ ID NO: 544, SEQ ID NO: 545, SEQ ID NO: 546, SEQ ID NO: 547, SEQ ID NO: 548, SEQ ID NO: 549, SEQ ID NO: 550, SEQ ID NO: 551, SEQ ID NO: 552, SEQ ID NO: 553, SEQ ID NO: 554, SEQ ID NO: 555, SEQ ID NO: 556, SEQ ID NO: 557, SEQ ID NO: 558, SEQ ID NO: 559, SEQ ID NO: 560, SEQ ID NO: 561, SEQ ID NO: 562, SEQ ID NO: 563, SEQ ID NO: 564, SEQ ID NO: 565, SEQ ID NO: 566, SEQ ID NO: 567, SEQ ID NO: 568, SEQ ID NO: 569, SEQ ID NO: 570, SEQ ID NO: 571, SEQ ID NO: 572, SEQ ID NO: 573, SEQ ID NO: 574, or SEQ ID NO: 575.

[0635] In some examples of any of the ABPCs described herein, the first antigen-binding domain includes a light chain variable domain comprising SEQ ID NO: 603, and a heavy chain variable domain comprising SEQ ID NO: 537, SEQ ID NO: 539, SEQ ID NO: 540, SEQ ID NO: 541, SEQ ID NO: 542, SEQ ID NO: 543, SEQ ID NO: 544, SEQ ID NO: 545, SEQ ID NO: 546, SEQ ID NO: 547, SEQ ID NO: 548, SEQ ID NO: 549, SEQ ID NO: 550, SEQ ID NO: 551, SEQ ID NO: 552, SEQ ID NO: 553, SEQ ID NO: 554, SEQ ID NO: 555, SEQ ID NO: 556, SEQ ID NO: 557, SEQ ID NO: 558, SEQ ID NO: 559, SEQ ID NO: 560, SEQ ID NO: 561, SEQ ID NO: 562, SEQ ID NO: 563, SEQ ID NO: 564, SEQ ID NO: 565, SEQ ID NO: 566, SEQ ID NO: 567, SEQ ID NO: 568, SEQ ID NO: 569, SEQ ID NO: 570, SEQ ID NO: 571, SEQ ID NO: 572, SEQ ID NO: 573, SEQ ID NO: 574, or SEQ ID NO: 575.

[0636] In some examples of any of the ABPCs described herein, the first antigen-binding domain includes a light chain variable domain comprising SEQ ID NO: 604, and a heavy chain variable domain comprising SEQ ID NO: 537, SEQ ID NO: 539, SEQ ID NO: 540, SEQ ID NO: 541, SEQ ID NO: 542, SEQ ID NO: 543, SEQ ID NO: 544, SEQ ID NO: 545, SEQ ID NO: 546, SEQ ID NO: 547, SEQ ID NO: 548, SEQ ID NO: 549, SEQ ID NO: 550, SEQ ID NO: 551, SEQ ID NO: 552, SEQ ID NO: 553, SEQ ID NO: 554, SEQ ID NO: 555, SEQ ID NO: 556, SEQ ID NO: 557, SEQ ID NO: 558, SEQ ID NO: 559, SEQ ID NO: 560, SEQ ID NO: 561, SEQ ID NO: 562, SEQ ID NO: 563, SEQ ID NO: 564, SEQ ID NO: 565, SEQ ID NO: 566, SEQ ID NO: 567, SEQ ID NO: 568, SEQ ID NO: 569, SEQ ID NO: 570, SEQ ID NO: 571, SEQ ID NO: 572, SEQ ID NO: 573, SEQ ID NO: 574, or SEQ ID NO: 575.

[0637] In some examples of any of the ABPCs described herein, the first antigen-binding domain includes a light chain variable domain comprising SEQ ID NO: 605, and a heavy chain variable domain comprising SEQ ID NO: 537, SEQ ID NO: 539, SEQ ID NO: 540, SEQ ID NO: 541, SEQ ID NO: 542, SEQ ID NO: 543, SEQ ID NO: 544, SEQ ID NO: 545, SEQ ID NO: 546, SEQ ID NO: 547, SEQ ID NO: 548, SEQ ID NO: 549, SEQ ID NO: 550, SEQ ID NO: 551, SEQ ID NO: 552, SEQ ID NO: 553, SEQ ID NO: 554, SEQ ID NO: 555, SEQ ID NO: 556, SEQ ID NO: 557, SEQ ID NO: 558, SEQ ID NO: 559, SEQ ID NO: 560, SEQ ID NO: 561, SEQ ID NO: 562, SEQ ID NO: 563, SEQ ID NO: 564, SEQ ID NO: 565, SEQ ID NO: 566, SEQ ID NO: 567, SEQ ID NO: 568, SEQ ID NO: 569, SEQ ID NO: 570, SEQ ID NO: 571, SEQ ID NO: 572, SEQ ID NO: 573, SEQ ID NO: 574, or SEQ ID NO: 575.

[0638] In some examples of any of the ABPCs described herein, the first antigen-binding domain includes a light chain variable domain comprising SEQ ID NO: 581, and a heavy chain variable domain comprising SEQ ID NO: 553. In some examples of any of the ABPCs described herein, the first antigen-binding domain includes a light chain variable domain comprising SEQ ID NO: 581, and a heavy chain variable domain comprising SEQ ID NO: 557. In some examples of any of the ABPCs described herein, the first antigen-binding domain includes a light chain variable domain comprising SEQ ID NO: 581, and a heavy chain variable domain comprising SEQ ID NO: 558. In some examples of any of the ABPCs described herein, the first antigen-binding domain includes a light chain variable domain comprising SEQ ID NO: 587, and a heavy chain variable domain comprising SEQ ID NO: 553. In some examples of any of the ABPCs described herein, the first antigen-binding domain includes a light chain variable domain comprising SEQ ID NO: 587, and a heavy chain variable domain comprising SEQ ID NO: 557. In some examples of any of the ABPCs described herein, the first antigen-binding domain includes a light chain variable domain comprising SEQ ID NO: 587, and a heavy chain variable domain comprising SEQ ID NO: 558. In some examples of any of the ABPCs described herein, the first antigen-binding domain includes a light chain variable domain comprising SEQ ID NO: 599, and a heavy chain variable domain comprising SEQ ID NO: 553. In some examples of any of the ABPCs described herein, the first antigen-binding domain includes a light chain variable domain comprising SEQ ID NO: 599, and a heavy chain variable domain comprising SEQ ID NO: 557. In some examples of any of the ABPCs described herein, the first antigen-binding domain includes a light chain variable domain comprising SEQ ID NO: 599, and a heavy chain variable domain comprising SEQ ID NO: 558. In some examples of any of the ABPCs described herein, the first antigen-binding domain includes a light chain variable domain comprising SEQ ID NO: 600, and a heavy chain variable domain comprising SEQ ID NO: 553. In some examples of any of the ABPCs described herein, the first antigen-binding domain includes a light chain variable domain comprising SEQ ID NO: 600, and a heavy chain variable domain comprising SEQ ID NO: 557. In some examples of any of the ABPCs described herein, the first antigen-binding domain includes a light chain variable domain comprising SEQ ID NO: 600, and a heavy chain variable domain comprising SEQ ID NO: 558.

[0639] In some examples of any of the ABPCs described herein, the first antigen-binding domain can include a sequence that is at least 80% identical (e.g., at least 85% identical, at least 90% identical, at least 92% identical, at least 94% identical, at least 96% identical, at least 98% identical, at least 99% identical, or 100% identical) to any one of SEQ ID NOs: 606-620.

[0640] Also provided herein are pharmaceutical compositions including any of the ABPCs described herein. Also provided herein are methods of treating a subject in need thereof that include administering a therapeutically effective amount of any of the ABPCs described herein to the subject.

[0641] In some examples of any of the ABPCs described herein, a composition including the ABPC (e.g., any of the ABPCs described herein) can provide for an increase (e.g., a detectable increase) (e.g., at least a 1% increase, at least a 2% increase, at least a 5% increase, at least a 10% increase, at least a 15% increase, at least a 20% increase, at least a 25% increase, at least a 30% increase, at least a 35% increase, at least a 40% increase, at least a 45% increase, at least a 50% increase, at least a 55% increase, at least a 60% increase, at least a 65% increase, at least a 70% increase, at least a 75% increase, at least a 80% increase, at least a 85% increase, at least a 90% increase, at least a 95% increase, at least a 100% increase, at least a 120% increase, at least a 140% increase, at least a 160% increase, at least a 180% increase, at least a 200% increase, at least a 250% increase, at least a 300% increase, at least a 350% increase, at least a 400% increase, at least a 450% increase, at least a 500% increase, at least a 1,000% increase, at least a 2,000% increase, at least a 3,000% increase, at least a 4,000% increase, at least a 5,000% increase, at least a 6,000% increase, at least a 7,000% increase, at least a 8,000% increase, at a least a 9,000% increase, or at least a 10,000% increase, or about a 1% increase to about 10,000% increase, about a 1% increase to about a 9,000% increase, about a 1% increase to about a 8,000% increase, about a 1% increase to about a 7,000% increase, about a 1% increase to about a 6,000% increase, about a 1% increase to about a 5,000% increase, about a 1% increase to about a 4,000% increase, about a 1% increase to about a 3,000% increase, about a 1% increase to about a 2,000% increase, about a 1% increase to about a 1,000% increase, about a 1% increase to about a 500% increase, about a 1% increase to about a 450% increase, about a 1% increase to about a 400% increase, about a 1% increase to about a 350% increase, about a 1% increase to about a 300% increase, about a 1% increase to about a 250% increase, about a 1% increase to about a 200% increase, about a 1% increase to about a 180% increase, about a 1% increase to about a 160% increase, about a 1% increase to about a 140% increase, about a 1% increase to about a 120% increase, about a 1% increase to about a 100% increase, about a 1% increase to about a 95% increase, about a 1% increase to about a 90% increase, about a 1% increase to about a 85% increase, about a 1% increase to about a 80% increase, about a 1% increase to about a 75% increase, about a 1% increase to about a 70% increase, about a 1% increase to about a 65% increase, about a 1% increase to about a 60% increase, about a 1% increase to about a 55% increase, about a 1% increase to about a 50% increase, about a 1% increase to about a 45% increase, about a 1% increase to about a 40% increase, about a 1% increase to about a 35% increase, about a 1% increase to about a 25% increase, about a 1% increase to about a 20% increase, about a 1% increase to about a 15% increase, about a 1% increase to about a 10% increase, about a 1% increase to about a 5% increase, about a 2% increase to about 10,000% increase, about a 2% increase to about a 9,000% increase, about a 2% increase to about a 8,000% increase, about a 2% increase to about a 7,000% increase, about a 2% increase to about a 6,000% increase, about a 2% increase to about a 5,000% increase, about a 2% increase to about a 4,000% increase, about a 2% increase to about a 3,000% increase, about a 2% increase to about a 2,000% increase, about a 2% increase to about a 1,000% increase, about a 2% increase to about a 500% increase, about a 2% increase to about a 450% increase, about a 2% increase to about a 400% increase, about a 2% increase to about a 350% increase, about a 2% increase to about a 300% increase, about a 2% increase to about a 250% increase, about a 2% increase to about a 200% increase, about a 2% increase to about a 180% increase, about a 2% increase to about a 160% increase, about a 2% increase to about a 140% increase, about a 2% increase to about a 120% increase, about a 2% increase to about a 100% increase, about a 2% increase to about a 95% increase, about a 2% increase to about a 90% increase, about a 2% increase to about a 85% increase, about a 2% increase to about a 80% increase, about a 2% increase to about a 75% increase, about a 2% increase to about a 70% increase, about a 2% increase to about a 65% increase, about a 2% increase to about a 60% increase, about a 2% increase to about a 55% increase, about a 2% increase to about a 50% increase, about a 2% increase to about a 45% increase, about a 2% increase to about a 40% increase, about a 2% increase to about a 35% increase, about a 2% increase to about a 25% increase, about a 2% increase to about a 20% increase, about a 2% increase to about a 15% increase, about a 2% increase to about a 10% increase, about a 2% increase to about a 5% increase, about a 5% increase to about 10,000% increase, about a 5% increase to about a 9,000% increase, about a 5% increase to about a 8,000% increase, about a 5% increase to about a 7,000% increase, about a 5% increase to about a 6,000% increase, about a 5% increase to about a 5,000% increase, about a 5% increase to about a 4,000% increase, about a 5% increase to about a 3,000% increase, about a 5% increase to about a 2,000% increase, about a 5% increase to about a 1,000% increase, about a 5% increase to about a 500% increase, about a 5% increase to about a 450% increase, about a 5% increase to about a 400% increase, about a 5% increase to about a 350% increase, about a 5% increase to about a 300% increase, about a 5% increase to about a 250% increase, about a 5% increase to about a 200% increase, about a 5% increase to about a 180% increase, about a 5% increase to about a 160% increase, about a 5% increase to about a 140% increase, about a 5% increase to about a 120% increase, about a 5% increase to about a 100% increase, about a 5% increase to about a 95% increase, about a 5% increase to about a 90% increase, about a 5% increase to about a 85% increase, about a 5% increase to about a 80% increase, about a 5% increase to about a 75% increase, about a 5% increase to about a 70% increase, about a 5% increase to about a 65% increase, about a 5% increase to about a 60% increase, about a 5% increase to about a 55% increase, about a 5% increase to about a 50% increase, about a 5% increase to about a 45% increase, about a 5% increase to about a 40% increase, about a 5% increase to about a 35% increase, about a 5% increase to about a 25% increase, about a 5% increase to about a 20% increase, about a 5% increase to about a 15% increase, about a 5% increase to about a 10% increase, about a 10% increase to about 10,000% increase, about a 10% increase to about a 9,000% increase, about a 10% increase to about a 8,000% increase, about a 10% increase to about a 7,000% increase, about a 10% increase to about a 6,000% increase, about a 10% increase to about a 5,000% increase, about a 10% increase to about a 4,000% increase, about a 10% increase to about a 3,000% increase, about a 10% increase to about a 2,000% increase, about a 10% increase to about a 1,000% increase, about a 10% increase to about a 500% increase, about a 10% increase to about a 450% increase, about a 10% increase to about a 400% increase, about a 10% increase to about a 350% increase, about a 10% increase to about a 300% increase, about a 10% increase to about a 250% increase, about a 10% increase to about a 200% increase, about a 10% increase to about a 180% increase, about a 10% increase to about a 160% increase, about a 10% increase to about a 140% increase, about a 10% increase to about a 120% increase, about a 10% increase to about a 100% increase, about a 10% increase to about a 95% increase, about a 10% increase to about a 90% increase, about a 10% increase to about a 85% increase, about a 10% increase to about a 80% increase, about a 10% increase to about a 75% increase, about a 10% increase to about a 70% increase, about a 10% increase to about a 65% increase, about a 10% increase to about a 60% increase, about a 10% increase to about a 55% increase, about a 10% increase to about a 50% increase, about a 10% increase to about a 45% increase, about a 10% increase to about a 40% increase, about a 10% increase to about a 35% increase, about a 10% increase to about a 30% increase, about a 10% increase to about a 25% increase, about a 10% increase to about a 20% increase, about a 10% increase to about a 15% increase, about a 15% increase to about 10,000% increase, about a 15% increase to about a 9,000% increase, about a 15% increase to about a 8,000% increase, about a 15% increase to about a 7,000% increase, about a 15% increase to about a 6,000% increase, about a 15% increase to about a 5,000% increase, about a 15% increase to about a 4,000% increase, about a 15% increase to about a 3,000% increase, about a 15% increase to about a 2,000% increase, about a 15% increase to about a 1,000% increase, about a 15% increase to about a 500% increase, about a 15% increase to about a 450% increase, about a 15% increase to about a 400% increase, about a 15% increase to about a 350% increase, about a 15% increase to about a 300% increase, about a 15% increase to about a 250% increase, about a 15% increase to about a 200% increase, about a 15% increase to about a 180% increase, about a 15% increase to about a 160% increase, about a 15% increase to about a 140% increase, about a 15% increase to about a 120% increase, about a 15% increase to about a 100% increase, about a 15% increase to about a 95% increase, about a 15% increase to about a 90% increase, about a 15% increase to about a 85% increase, about a 15% increase to about a 80% increase, about a 15% increase to about a 75% increase, about a 15% increase to about a 70% increase, about a 15% increase to about a 65% increase, about a 15% increase to about a 60% increase, about a 15% increase to about a 55% increase, about a 15% increase to about a 50% increase, about a 15% increase to about a 45% increase, about a 15% increase to about a 40% increase, about a 15% increase to about a 35% increase, about a 15% increase to about a 30% increase, about a 15% increase to about a 25% increase, about a 15% increase to about a 20% increase, about a 20% increase to about 10,000% increase, about a 20% increase to about a 9,000% increase, about a 20% increase to about a 8,000% increase, about a 20% increase to about a 7,000% increase, about a 20% increase to about a 6,000% increase, about a 20% increase to about a 5,000% increase, about a 20% increase to about a 4,000% increase, about a 20% increase to about a 3,000% increase, about a 20% increase to about a 2,000% increase, about a 20% increase to about a 1,000% increase, about a 20% increase to about a 500% increase, about a 20% increase to about a 450% increase, about a 20% increase to about a 400% increase, about a 20% increase to about a 350% increase, about a 20% increase to about a 300% increase, about a 20% increase to about a 250% increase, about a 20% increase to about a 200% increase, about a 20% increase to about a 180% increase, about a 20% increase to about a 160% increase, about a 20% increase to about a 140% increase, about a 20% increase to about a 120% increase, about a 20% increase to about a 100% increase, about a 20% increase to about a 95% increase, about a 20% increase to about a 90% increase, about a 20% increase to about a 85% increase, about a 20% increase to about a 80% increase, about a 20% increase to about a 75% increase, about a 20% increase to about a 70% increase, about a 20% increase to about a 65% increase, about a 20% increase to about a 60% increase, about a 20% increase to about a 55% increase, about a 20% increase to about a 50% increase, about a 20% increase to about a 45% increase, about a 20% increase to about a 40% increase, about a 20% increase to about a 35% increase, about a 20% increase to about a 30% increase, about a 20% increase to about a 25% increase, about a 25% increase to about 10,000% increase, about a 25% increase to about a 9,000% increase, about a 25% increase to about a 8,000% increase, about a 25% increase to about a 7,000% increase, about a 25% increase to about a 6,000% increase, about a 25% increase to about a 5,000% increase, about a 25% increase to about a 4,000% increase, about a 25% increase to about a 3,000% increase, about a 25% increase to about a 2,000% increase, about a 25% increase to about a 1,000% increase, about a 25% increase to about a 500% increase, about a 25% increase to about a 450% increase, about a 25% increase to about a 400% increase, about a 25% increase to about a 350% increase, about a 25% increase to about a 300% increase, about a 25% increase to about a 250% increase, about a 25% increase to about a 200% increase, about a 25% increase to about a 180% increase, about a 25% increase to about a 160% increase, about a 25% increase to about a 140% increase, about a 25% increase to about a 120% increase, about a 25% increase to about a 100% increase, about a 25% increase to about a 95% increase, about a 25% increase to about a 90% increase, about a 25% increase to about a 85% increase, about a 25% increase to about a 80% increase, about a 25% increase to about a 75% increase, about a 25% increase to about a 70% increase, about a 25% increase to about a 65% increase, about a 25% increase to about a 60% increase, about a 25% increase to about a 55% increase, about a 25% increase to about a 50% increase, about a 25% increase to about a 45% increase, about a 25% increase to about a 40% increase, about a 25% increase to about a 35% increase, about a 25% increase to about a 30% increase, about a 30% increase to about 10,000% increase, about a 30% increase to about a 9,000% increase, about a 30% increase to about a 8,000% increase, about a 30% increase to about a 7,000% increase, about a 30% increase to about a 6,000% increase, about a 30% increase to about a 5,000% increase, about a 30% increase to about a 4,000% increase, about a 30% increase to about a 3,000% increase, about a 30% increase to about a 2,000% increase, about a 30% increase to about a 1,000% increase, about a 30% increase to about a 500% increase, about a 30% increase to about a 450% increase, about a 30% increase to about a 400% increase, about a 30% increase to about a 350% increase, about a 30% increase to about a 300% increase, about a 30% increase to about a 250% increase, about a 30% increase to about a 200% increase, about a 30% increase to about a 180% increase, about a 30% increase to about a 160% increase, about a 30% increase to about a 140% increase, about a 30% increase to about a 120% increase, about a 30% increase to about a 100% increase, about a 30% increase to about a 95% increase, about a 30% increase to about a 90% increase, about a 30% increase to about a 85% increase, about a 30% increase to about a 80% increase, about a 30% increase to about a 75% increase, about a 30% increase to about a 70% increase, about a 30% increase to about a 65% increase, about a 30% increase to about a 60% increase, about a 30% increase to about a 55% increase, about a 30% increase to about a 50% increase, about a 30% increase to about a 45% increase, about a 30% increase to about a 40% increase, about a 30% increase to about a 35% increase, about a 35% increase to about 10,000% increase, about a 35% increase to about a 9,000% increase, about a 35% increase to about a 8,000% increase, about a 35% increase to about a 7,000% increase, about a 35% increase to about a 6,000% increase, about a 35% increase to about a 5,000% increase, about a 35% increase to about a 4,000% increase, about a 35% increase to about a 3,000% increase, about a 35% increase to about a 2,000% increase, about a 35% increase to about a 1,000% increase, about a 35% increase to about a 500% increase, about a 35% increase to about a 450% increase, about a 35% increase to about a 400% increase, about a 35% increase to about a 350% increase, about a 35% increase to about a 300% increase, about a 35% increase to about a 250% increase, about a 35% increase to about a 200% increase, about a 35% increase to about a 180% increase, about a 35% increase to about a 160% increase, about a 35% increase to about a 140% increase, about a 35% increase to about a 120% increase, about a 35% increase to about a 100% increase, about a 35% increase to about a 95% increase, about a 35% increase to about a 90% increase, about a 35% increase to about a 85% increase, about a 35% increase to about a 80% increase, about a 35% increase to about a 75% increase, about a 35% increase to about a 70% increase, about a 35% increase to about a 65% increase, about a 35% increase to about a 60% increase, about a 35% increase to about a 55% increase, about a 35% increase to about a 50% increase, about a 35% increase to about a 45% increase, about a 35% increase to about a 40% increase, about a 40% increase to about 10,000% increase, about a 40% increase to about a 9,000% increase, about a 40% increase to about a 8,000% increase, about a 40% increase to about a 7,000% increase, about a 40% increase to about a 6,000% increase, about a 40% increase to about a 5,000% increase, about a 40% increase to about a 4,000% increase, about a 40% increase to about a 3,000% increase, about a 40% increase to about a 2,000% increase, about a 40% increase to about a 1,000% increase, about a 40% increase to about a 500% increase, about a 40% increase to about a 450% increase, about a 40% increase to about a 400% increase, about a 40% increase to about a 350% increase, about a 40% increase to about a 300% increase, about a 40% increase to about a 250% increase, about a 40% increase to about a 200% increase, about a 40% increase to about a 180% increase, about a 40% increase to about a 160% increase, about a 40% increase to about a 140% increase, about a 40% increase to about a 120% increase, about a 40% increase to about a 100% increase, about a 40% increase to about a 95% increase, about a 40% increase to about a 90% increase, about a 40% increase to about a 85% increase, about a 40% increase to about a 80% increase, about a 40% increase to about a 75% increase, about a 40% increase to about a 70% increase, about a 40% increase to about a 65% increase, about a 40% increase to about a 60% increase, about a 40% increase to about a 55% increase, about a 40% increase to about a 50% increase, about a 40% increase to about a 45% increase, about a 45% increase to about 10,000% increase, about a 45% increase to about a 9,000% increase, about a 45% increase to about a 8,000% increase, about a 45% increase to about a 7,000% increase, about a 45% increase to about a 6,000% increase, about a 45% increase to about a 5,000% increase, about a 45% increase to about a 4,000% increase, about a 45% increase to about a 3,000% increase, about a 45% increase to about a 2,000% increase, about a 45% increase to about a 1,000% increase, about a 45% increase to about a 500% increase, about a 45% increase to about a 450% increase, about a 45% increase to about a 400% increase, about a 45% increase to about a 350% increase, about a 45% increase to about a 300% increase, about a 45% increase to about a 250% increase, about a 45% increase to about a 200% increase, about a 45% increase to about a 180% increase, about a 45% increase to about a 160% increase, about a 45% increase to about a 140% increase, about a 45% increase to about a 120% increase, about a 45% increase to about a 100% increase, about a 45% increase to about a 95% increase, about a 45% increase to about a 90% increase, about a 45% increase to about a 85% increase, about a 45% increase to about a 80% increase, about a 45% increase to about a 75% increase, about a 45% increase to about a 70% increase, about a 45% increase to about a 65% increase, about a 45% increase to about a 60% increase, about a 45% increase to about a 55% increase, about a 45% increase to about a 50% increase, about a 50% increase to about 10,000% increase, about a 50% increase to about a 9,000% increase, about a 50% increase to about a 8,000% increase, about a 50% increase to about a 7,000% increase, about a 50% increase to about a 6,000% increase, about a 50% increase to about a 5,000% increase, about a 50% increase to about a 4,000% increase, about a 50% increase to about a 3,000% increase, about a 50% increase to about a 2,000% increase, about a 50% increase to about a 1,000% increase, about a 50% increase to about a 500% increase, about a 50% increase to about a 450% increase, about a 50% increase to about a 400% increase, about a 50% increase to about a 350% increase, about a 50% increase to about a 300% increase, about a 50% increase to about a 250% increase, about a 50% increase to about a 200% increase, about a 50% increase to about a 180% increase, about a 50% increase to about a 160% increase, about a 50% increase to about a 140% increase, about a 50% increase to about a 120% increase, about a 50% increase to about a 100% increase, about a 50% increase to about a 95% increase, about a 50% increase to about a 90% increase, about a 50% increase to about a 85% increase, about a 50% increase to about a 80% increase, about a 50% increase to about a 75% increase, about a 50% increase to about a 70% increase, about a 50% increase to about a 65% increase, about a 50% increase to about a 60% increase, about a 50% increase to about a 55% increase, about a 55% increase to about 10,000% increase, about a 55% increase to about a 9,000% increase, about a 55% increase to about a 8,000% increase, about a 55% increase to about a 7,000% increase, about a 55% increase to about a 6,000% increase, about a 55% increase to about a 5,000% increase, about a 55% increase to about a 4,000% increase, about a 55% increase to about a 3,000% increase, about a 55% increase to about a 2,000% increase, about a 55% increase to about a 1,000% increase, about a 55% increase to about a 500% increase, about a 55% increase to about a 450% increase, about a 55% increase to about a 400% increase, about a 55% increase to about a 350% increase, about a 55% increase to about a 300% increase, about a 55% increase to about a 250% increase, about a 55% increase to about a 200% increase, about a 55% increase to about a 180% increase, about a 55% increase to about a 160% increase, about a 55% increase to about a 140% increase, about a 55% increase to about a 120% increase, about a 55% increase to about a 100% increase, about a 55% increase to about a 95% increase, about a 55% increase to about a 90% increase, about a 55% increase to about a 85% increase, about a 55% increase to about a 80% increase, about a 55% increase to about a 75% increase, about a 55% increase to about a 70% increase, about a 55% increase to about a 65% increase, about a 55% increase to about a 60% increase, about a 60% increase to about 10,000% increase, about a 60% increase to about a 9,000% increase, about a 60% increase to about a 8,000% increase, about a 60% increase to about a 7,000% increase, about a 60% increase to about a 6,000% increase, about a 60% increase to about a 5,000% increase, about a 60% increase to about a 4,000% increase, about a 60% increase to about a 3,000% increase, about a 60% increase to about a 2,000% increase, about a 60% increase to about a 1,000% increase, about a 60% increase to about a 500% increase, about a 60% increase to about a 450% increase, about a 60% increase to about a 400% increase, about a 60% increase to about a 350% increase, about a 60% increase to about a 300% increase, about a 60% increase to about a 250% increase, about a 60% increase to about a 200% increase, about a 60% increase to about a 180% increase, about a 60% increase to about a 160% increase, about a 60% increase to about a 140% increase, about a 60% increase to about a 120% increase, about a 60% increase to about a 100% increase, about a 60% increase to about a 95% increase, about a 60% increase to about a 90% increase, about a 60% increase to about a 85% increase, about a 60% increase to about a 80% increase, about a 60% increase to about a 75% increase, about a 60% increase to about a 70% increase, about a 60% increase to about a 65% increase, about a 65% increase to about 10,000% increase, about a 65% increase to about a 9,000% increase, about a 65% increase to about a 8,000% increase, about a 65% increase to about a 7,000% increase, about a 65% increase to about a 6,000% increase, about a 65% increase to about a 5,000% increase, about a 65% increase to about a 4,000% increase, about a 65% increase to about a 3,000% increase, about a 65% increase to about a 2,000% increase, about a 65% increase to about a 1,000% increase, about a 65% increase to about a 500% increase, about a 65% increase to about a 450% increase, about a 65% increase to about a 400% increase, about a 65% increase to about a 350% increase, about a 65% increase to about a 300% increase, about a 65% increase to about a 250% increase, about a 65% increase to about a 200% increase, about a 65% increase to about a 180% increase, about a 65% increase to about a 160% increase, about a 65% increase to about a 140% increase, about a 65% increase to about a 120% increase, about a 65% increase to about a 100% increase, about a 65% increase to about a 95% increase, about a 65% increase to about a 90% increase, about a 65% increase to about a 85% increase, about a 65% increase to about a 80% increase, about a 65% increase to about a 75% increase, about a 65% increase to about a 70% increase, about a 70% increase to about 10,000% increase, about a 70% increase to about a 9,000% increase, about a 70% increase to about a 8,000% increase, about a 70% increase to about a 7,000% increase, about a 70% increase to about a 6,000% increase, about a 70% increase to about a 5,000% increase, about a 70% increase to about a 4,000% increase, about a 70% increase to about a 3,000% increase, about a 70% increase to about a 2,000% increase, about a 70% increase to about a 1,000% increase, about a 70% increase to about a 500% increase, about a 70% increase to about a 450% increase, about a 70% increase to about a 400% increase, about a 70% increase to about a 350% increase, about a 70% increase to about a 300% increase, about a 70% increase to about a 250% increase, about a 70% increase to about a 200% increase, about a 70% increase to about a 180% increase, about a 70% increase to about a 160% increase, about a 70% increase to about a 140% increase, about a 70% increase to about a 120% increase, about a 70% increase to about a 100% increase, about a 70% increase to about a 95% increase, about a 70% increase to about a 90% increase, about a 70% increase to about a 85% increase, about a 70% increase to about a 80% increase, about a 70% increase to about a 75% increase, about a 75% increase to about 10,000% increase, about a 75% increase to about a 9,000% increase, about a 75% increase to about a 8,000% increase, about a 75% increase to about a 7,000% increase, about a 75% increase to about a 6,000% increase, about a 75% increase to about a 5,000% increase, about a 75% increase to about a 4,000% increase, about a 75% increase to about a 3,000% increase, about a 75% increase to about a 2,000% increase, about a 75% increase to about a 1,000% increase, about a 75% increase to about a 500% increase, about a 75% increase to about a 450% increase, about a 75% increase to about a 400% increase, about a 75% increase to about a 350% increase, about a 75% increase to about a 300% increase, about a 75% increase to about a 250% increase, about a 75% increase to about a 200% increase, about a 75% increase to about a 180% increase, about a 75% increase to about a 160% increase, about a 75% increase to about a 140% increase, about a 75% increase to about a 120% increase, about a 75% increase to about a 100% increase, about a 75% increase to about a 95% increase, about a 75% increase to about a 90% increase, about a 75% increase to about a 85% increase, about a 75% increase to about a 80%, about a 80% increase to about 10,000% increase, about a 80% increase to about a 9,000% increase, about a 80% increase to about a 8,000% increase, about a 80% increase to about a 7,000% increase, about a 80% increase to about a 6,000% increase, about a 80% increase to about a 5,000% increase, about a 80% increase to about a 4,000% increase, about a 80% increase to about a 3,000% increase, about a 80% increase to about a 2,000% increase, about a 80% increase to about a 1,000% increase, increase, about a 80% increase to about a 500% increase, about a 80% increase to about a 450% increase, about a 80% increase to about a 400% increase, about a 80% increase to about a 350% increase, about a 80% increase to about a 300% increase, about a 80% increase to about a 250% increase, about a 80% increase to about a 200% increase, about a 80% increase to about a 180% increase, about a 80% increase to about a 160% increase, about a 80% increase to about a 140% increase, about a 80% increase to about a 120% increase, about a 80% increase to about a 100% increase, about a 80% increase to about a 95% increase, about a 80% increase to about a 90% increase, about a 80% increase to about a 85% increase, about a 85% increase to about 10,000% increase, about a 85% increase to about a 9,000% increase, about a 85% increase to about a 8,000% increase, about a 85% increase to about a 7,000% increase, about a 85% increase to about a 6,000% increase, about a 85% increase to about a 5,000% increase, about a 85% increase to about a 4,000% increase, about a 85% increase to about a 3,000% increase, about a 85% increase to about a 2,000% increase, about a 85% increase to about a 1,000% increase, about a 85% increase to about a 500% increase, about a 85% increase to about a 450% increase, about a 85% increase to about a 400% increase, about a 85% increase to about a 350% increase, about a 85% increase to about a 300% increase, about a 85% increase to about a 250% increase, about a 85% increase to about a 200% increase, about a 85% increase to about a 180% increase, about a 85% increase to about a 160% increase, about a 85% increase to about a 140% increase, about a 85% increase to about a 120% increase, about a 85% increase to about a 100% increase, about a 85% increase to about a 95% increase, about a 85% increase to about a 90% increase, about a 90% increase to about 10,000% increase, about a 90% increase to about a 9,000% increase, about a 90% increase to about a 8,000% increase, about a 90% increase to about a 7,000% increase, about a 90% increase to about a 6,000% increase, about a 90% increase to about a 5,000% increase, about a 90% increase to about a 4,000% increase, about a 90% increase to about a 3,000% increase, about a 90% increase to about a 2,000% increase, about a 90% increase to about a 1,000% increase, about a 90% increase to about a 500% increase, about a 90% increase to about a 450% increase, about a 90% increase to about a 400% increase, about a 90% increase to about a 350% increase, about a 90% increase to about a 300% increase, about a 90% increase to about a 250% increase, about a 90% increase to about a 200% increase, about a 90% increase to about a 180% increase, about a 90% increase to about a 160% increase, about a 90% increase to about a 140% increase, about a 90% increase to about a 120% increase, about a 90% increase to about a 100% increase, about a 90% increase to about a 95% increase, about a 95% increase to about 10,000% increase, about a 95% increase to about a 9,000% increase, about a 95% increase to about a 8,000% increase, about a 95% increase to about a 7,000% increase, about a 95% increase to about a 6,000% increase, about a 95% increase to about a 5,000% increase, about a 95% increase to about a 4,000% increase, about a 95% increase to about a 3,000% increase, about a 95% increase to about a 2,000% increase, about a 95% increase to about a 1,000% increase, about a 95% increase to about a 500% increase, about a 95% increase to about a 450% increase, about a 95% increase to about a 400% increase, about a 95% increase to about a 350% increase, about a 95% increase to about a 300% increase, about a 95% increase to about a 250% increase, about a 95% increase to about a 200% increase, about a 95% increase to about a 180% increase, about a 95% increase to about a 160% increase, about a 95% increase to about a 140% increase, about a 95% increase to about a 120% increase, about a 95% increase to about a 100% increase, about a 100% increase to about 10,000% increase, about a 100% increase to about a 9,000% increase, about a 100% increase to about a 8,000% increase, about a 100% increase to about a 7,000% increase, about a 100% increase to about a 6,000% increase, about a 100% increase to about a 5,000% increase, about a 100% increase to about a 4,000% increase, about a 100% increase to about a 3,000% increase, about a 100% increase to about a 2,000% increase, about a 100% increase to about a 1,000% increase, about a 100% increase to about a 500% increase, about a 100% increase to about a 450% increase, about a 100% increase to about a 400% increase, about a 100% increase to about a 350% increase, about a 100% increase to about a 300% increase, about a 100% increase to about a 250% increase, about a 100% increase to about a 200% increase, about a 100% increase to about a 180% increase, about a 100% increase to about a 160% increase, about a 100% increase to about a 140% increase, about a 100% increase to about a 120% increase, about a 120% increase to about 10,000% increase, about a 120% increase to about a 9,000% increase, about a 120% increase to about a 8,000% increase, about a 120% increase to about a 7,000% increase, about a 120% increase to about a 6,000% increase, about a 120% increase to about a 5,000% increase, about a 120% increase to about a 4,000% increase, about a 120% increase to about a 3,000% increase, about a 120% increase to about a 2,000% increase, about a 120% increase to about a 1,000% increase, about a 120% increase to about a 500% increase, about a 120% increase to about a 450% increase, about a 120% increase to about a 400% increase, about a 120% increase to about a 350% increase, about a 120% increase to about a 300% increase, about a 120% increase to about a 250% increase, about a 120% increase to about a 200% increase, about a 120% increase to about a 180% increase, about a 120% increase to about a 160% increase, about a 120% increase to about a 140% increase, about a 140% increase to about 10,000% increase, about a 140% increase to about a 9,000% increase, about a 140% increase to about a 8,000% increase, about a 140% increase to about a 7,000% increase, about a 140% increase to about a 6,000% increase, about a 140% increase to about a 5,000% increase, about a 140% increase to about a 4,000% increase, about a 140% increase to about a 3,000% increase, about a 140% increase to about a 2,000% increase, about a 140% increase to about a 1,000% increase, about a 140% increase to about a 500% increase, about a 140% increase to about a 450% increase, about a 140% increase to about a 400% increase, about a 140% increase to about a 350% increase, about a 140% increase to about a 300% increase, about a 140% increase to about a 250% increase, about a 140% increase to about a 200% increase, about a 140% increase to about a 180% increase, about a 140% increase to about a 160% increase, about a 160% increase to about 10,000% increase, about a 160% increase to about a 9,000% increase, about a 160% increase to about a 8,000% increase, about a 160% increase to about a 7,000% increase, about a 160% increase to about a 6,000% increase, about a 160% increase to about a 5,000% increase, about a 160% increase to about a 4,000% increase, about a 160% increase to about a 3,000% increase, about a 160% increase to about a 2,000% increase, about a 160% increase to about a 1,000% increase, about a 160% increase to about a 500% increase, about a 160% increase to about a 450% increase, about a 160% increase to about a 400% increase, about a 160% increase to about a 350% increase, about a 160% increase to about a 300% increase, about a 160% increase to about a 250% increase, about a 160% increase to about a 200% increase, about a 160% increase to about a 180% increase, about a 180% increase to about 10,000% increase, about a 180% increase to about a 9,000% increase, about a 180% increase to about a 8,000% increase, about a 180% increase to about a 7,000% increase, about a 180% increase to about a 6,000% increase, about a 180% increase to about a 5,000% increase, about a 180% increase to about a 4,000% increase, about a 180% increase to about a 3,000% increase, about a 180% increase to about a 2,000% increase, about a 180% increase to about a 1,000% increase, about a 180% increase to about a 500% increase, about a 180% increase to about a 450% increase, about a 180% increase to about a 400% increase, about a 180% increase to about a 350% increase, about a 180% increase to about a 300% increase, about a 180% increase to about a 250% increase, about a 180% increase to about a 200% increase, about a 200% increase to about 10,000% increase, about a 200% increase to about a 9,000% increase, about a 200% increase to about a 8,000% increase, about a 200% increase to about a 7,000% increase, about a 200% increase to about a 6,000% increase, about a 200% increase to about a 5,000% increase, about a 200% increase to about a 4,000% increase, about a 200% increase to about a 3,000% increase, about a 200% increase to about a 2,000% increase, about a 200% increase to about a 1,000% increase, about a 200% increase to about a 500% increase, about a 200% increase to about a 450% increase, about a 200% increase to about a 400% increase, about a 200% increase to about a 350% increase, about a 200% increase to about a 300% increase, about a 200% increase to about a 250% increase, about a 250% increase to about 10,000% increase, about a 250% increase to about a 9,000% increase, about a 250% increase to about a 8,000% increase, about a 250% increase to about a 7,000% increase, about a 250% increase to about a 6,000% increase, about a 250% increase to about a 5,000% increase, about a 250% increase to about a 4,000% increase, about a 250% increase to about a 3,000% increase, about a 250% increase to about a 2,000% increase, about a 250% increase to about a 1,000% increase, about a 250% increase to about a 500% increase, about a 250% increase to about a 450% increase, about a 250% increase to about a 400% increase, about a 250% increase to about a 350% increase, about a 250% increase to about a 300% increase, about a 300% increase to about 10,000% increase, about a 300% increase to about a 9,000% increase, about a 300% increase to about a 8,000% increase, about a 300% increase to about a 7,000% increase, about a 300% increase to about a 6,000% increase, about a 300% increase to about a 5,000% increase, about a 300% increase to about a 4,000% increase, about a 300% increase to about a 3,000% increase, about a 300% increase to about a 2,000% increase, about a 300% increase to about a 1,000% increase, about a 300% increase to about a 500% increase, about a 300% increase to about a 450% increase, about a 300% increase to about a 400% increase, about a 300% increase to about a 350% increase, about a 350% increase to about 10,000% increase, about a 350% increase to about a 9,000% increase, about a 350% increase to about a 8,000% increase, about a 350% increase to about a 7,000% increase, about a 350% increase to about a 6,000% increase, about a 350% increase to about a 5,000% increase, about a 350% increase to about a 4,000% increase, about a 350% increase to about a 3,000% increase, about a 350% increase to about a 2,000% increase, about a 350% increase to about a 1,000% increase, about a 350% increase to about a 500% increase, about a 350% increase to about a 450% increase, about a 350% increase to about a 400% increase, about a 400% increase to about 10,000% increase, about a 400% increase to about a 9,000% increase, about a 400% increase to about a 8,000% increase, about a 400% increase to about a 7,000% increase, about a 400% increase to about a 6,000% increase, about a 400% increase to about a 5,000% increase, about a 400% increase to about a 4,000% increase, about a 400% increase to about a 3,000% increase, about a 400% increase to about a 2,000% increase, about a 400% increase to about a 1,000% increase, about a 400% increase to about a 500% increase, about a 400% increase to about a 450% increase, about a 450% increase to about 10,000% increase, about a 450% increase to about a 9,000% increase, about a 450% increase to about a 8,000% increase, about a 450% increase to about a 7,000% increase, about a 450% increase to about a 6,000% increase, about a 450% increase to about a 5,000% increase, about a 450% increase to about a 4,000% increase, about a 450% increase to about a 3,000% increase, about a 450% increase to about a 2,000% increase, about a 450% increase to about a 1,000% increase, about a 450% increase to about a 500% increase, about a 500% increase to about 10,000% increase, about a 500% increase to about a 9,000% increase, about a 500% increase to about a 8,000% increase, about a 500% increase to about a 7,000% increase, about a 500% increase to about a 6,000% increase, about a 500% increase to about a 5,000% increase, about a 500% increase to about a 4,000% increase, about a 500% increase to about a 3,000% increase, about a 500% increase to about a 2,000% increase, about a 500% increase to about a 1,000% increase, about a 1,000% increase to about 10,000% increase, about a 1,000% increase to about a 9,000% increase, about a 1,000% increase to about a 8,000% increase, about a 1,000% increase to about a 7,000% increase, about a 1,000% increase to about a 6,000% increase, about a 1,000% increase to about a 5,000% increase, about a 1,000% increase to about a 4,000% increase, about a 1,000% increase to about a 3,000% increase, about a 1,000% increase to about a 2,000% increase, about a 2,000% increase to about 10,000% increase, about a 2,000% increase to about a 9,000% increase, about a 2,000% increase to about a 8,000% increase, about a 2,000% increase to about a 7,000% increase, about a 2,000% increase to about a 6,000% increase, about a 2,000% increase to about a 5,000% increase, about a 2,000% increase to about a 4,000% increase, about a 2,000% increase to about a 3,000% increase, about a 3,000% increase to about 10,000% increase, about a 3,000% increase to about a 9,000% increase, about a 3,000% increase to about a 8,000% increase, about a 3,000% increase to about a 7,000% increase, about a 3,000% increase to about a 6,000% increase, about a 3,000% increase to about a 5,000% increase, about a 3,000% increase to about a 4,000% increase, about a 4,000% increase to about 10,000% increase, about a 4,000% increase to about a 9,000% increase, about a 4,000% increase to about a 8,000% increase, about a 4,000% increase to about a 7,000% increase, about a 4,000% increase to about a 6,000% increase, about a 4,000% increase to about a 5,000% increase, about a 5,000% increase to about 10,000% increase, about a 5,000% increase to about a 9,000% increase, about a 5,000% increase to about a 8,000% increase, about a 5,000% increase to about a 7,000% increase, about a 5,000% increase to about a 6,000% increase, about a 6,000% increase to about 10,000% increase, about a 6,000% increase to about a 9,000% increase, about a 6,000% increase to about a 8,000% increase, about a 6,000% increase to about a 7,000% increase, about a 7,000% increase to about 10,000% increase, about a 7,000% increase to about a 9,000% increase, about a 7,000% increase to about a 8,000% increase, about a 8,000% increase to about 10,000% increase, about a 8,000% increase to about a 9,000% increase, or about a 9,000% increase to about 10,000%) in toxin liberation in the target mammalian cell (e.g., any of the target mammalian cells described herein) as compared to a composition including the same amount of a control ABPC (e.g., any of the exemplary control ABPCs described herein).

[0642] In some examples of any of the ABPCs described herein, a composition including the ABPC (e.g., any of the ABPCs described herein) can provide for an increase (e.g., a detectable increase) (e.g., at least a 0.1-fold increase, at least a 0.2-fold increase, at least a 0.3-fold increase, at least a 0.4-fold increase, at least a 0.5-fold increase, at least a 0.6-fold increase, at least a 0.7-fold increase, at least a 0.8-fold increase, at least a 0.9-fold increase, at least a 1.0-fold increase, at least a 1.2-fold increase, at least a 1.4-fold increase, at least a 1.5-fold increase, at least a 1.6-fold increase, at least a 1.8-fold increase, at least a 2.0-fold increase, at least a 2.2-fold increase, at least a 2.4-fold increase, at least a 2.5-fold increase, at least a 2.6-fold increase, at least a 2.8-fold increase, at least a 3.0-fold increase, at least a 3.5-fold increase, at least a 4.0-fold increase, at least a 4.5-fold increase, at least a 5.0-fold increase, at least a 5.5-fold increase, at least a 6.0-fold increase, at least a 6.5-fold increase, at least a 7.0-fold increase, at least a 7.5-fold increase, at least a 8.0-fold increase, at least a 8.5-fold increase, at least a 9.0-fold increase, at least a 9.5-fold increase, at least a 10-fold increase, at least a 15-fold increase, at least a 20-fold increase, at least a 25-fold increase, at least a 30-fold increase, at least a 35-fold increase, at least a 40-fold increase, at least a 45-fold increase, at least a 50-fold increase, at least a 55-fold increase, at least a 60-fold increase, at least a 65-fold increase, at least a 70-fold increase, at least a 75-fold increase, at least a 80-fold increase, at least a 85-fold increase, at least a 90-fold increase, at least a 95-fold increase, or at least a 100-fold increase, or about a 0.1-fold increase to about a 100-fold increase, about 0.1-fold increase to about a 90-fold increase, about 0.1-fold increase to about a 80-fold increase, about a 0.1-fold increase to about a 70-fold increase, about a 0.1-fold increase to about a 60-fold increase, about a 0.1-fold increase to about a 50-fold increase, about a 0.1-fold increase to about a 40-fold increase, about a 0.1-fold increase to about a 30-fold increase, about 0.1-fold increase to about 20-fold increase, about a 0.1-fold increase to about a 10-fold increase, about a 0.1-fold increase to about a 9.5-fold increase, about a 0.1-fold increase to about a 9.0-fold increase, about a 0.1-fold increase to about a 8.5-fold increase, about a 0.1-fold increase to about a 8.0-fold increase, about a 0.1-fold increase to about a 7.5-fold increase, about a 0.1-fold increase to about a 7.0-fold increase, about a 0.1-fold increase to about a 6.5-fold increase, about a 0.1-fold increase to about a 6.0-fold increase, about a 0.1-fold increase to about a 5.5-fold increase, about a 0.1-fold increase to about a 5.0-fold increase, about a 0.1-fold increase to about a 4.5-fold increase, about a 0.1-fold increase to about a 4.0-fold increase, about a 0.1-fold increase to about a 3.5-fold increase, about 0.1-fold increase to about a 3.0-fold increase, about a 0.1-fold increase to about a 2.8-fold increase, about a 0.1-fold increase to about a 2.6-fold increase, about a 0.1-fold increase to about a 2.5-fold increase, about a 0.1-fold increase to about a 2.4-fold increase, about a 0.1-fold increase to about a 2.2-fold increase, about a 0.1-fold increase to about a 2.0-fold increase, about a 0.1-fold increase to about a 1.8-fold increase, about a 0.1-fold increase to about a 1.6-fold increase, about a 0.1-fold increase to about a 1.5-fold increase, about a 0.1-fold increase to about a 1.4-fold increase, about a 0.1-fold increase to about a 1.2-fold increase, about a 0.1-fold increase to about a 1.0-fold increase, about a 0.1-fold increase to about a 0.9-fold increase, about a 0.1-fold increase to about a 0.8-fold increase, about a 0.1-fold increase to about a 0.7-fold increase, about a 0.1-fold increase to about a 0.6-fold increase, about a 0.1-fold increase to about a 0.5-fold increase, about a 0.1-fold increase to about a 0.4-fold increase, about a 0.1-fold increase to about a 0.3-fold increase, about a 0.2-fold increase to about a 100-fold increase, about 0.2-fold increase to about a 90-fold increase, about 0.2-fold increase to about a 80-fold increase, about a 0.2-fold increase to about a 70-fold increase, about a 0.2-fold increase to about a 60-fold increase, about a 0.2-fold increase to about a 50-fold increase, about a 0.2-fold increase to about a 40-fold increase, about a 0.2-fold increase to about a 30-fold increase, about 0.2-fold increase to about 20-fold increase, about a 0.2-fold increase to about a 10-fold increase, about a 0.2-fold increase to about a 9.5-fold increase, about a 0.2-fold increase to about a 9.0-fold increase, about a 0.2-fold increase to about a 8.5-fold increase, about a 0.2-fold increase to about a 8.0-fold increase, about a 0.2-fold increase to about a 7.5-fold increase, about a 0.2-fold increase to about a 7.0-fold increase, about a 0.2-fold increase to about a 6.5-fold increase, about a 0.2-fold increase to about a 6.0-fold increase, about a 0.2-fold increase to about a 5.5-fold increase, about a 0.2-fold increase to about a 5.0-fold increase, about a 0.2-fold increase to about a 4.5-fold increase, about a 0.2-fold increase to about a 4.0-fold increase, about a 0.2-fold increase to about a 3.5-fold increase, about 0.2-fold increase to about a 3.0-fold increase, about a 0.2-fold increase to about a 2.8-fold increase, about a 0.2-fold increase to about a 2.6-fold increase, about a 0.2-fold increase to about a 2.5-fold increase, about a 0.2-fold increase to about a 2.4-fold increase, about a 0.2-fold increase to about a 2.2-fold increase, about a 0.2-fold increase to about a 2.0-fold increase, about a 0.2-fold increase to about a 1.8-fold increase, about a 0.2-fold increase to about a 1.6-fold increase, about a 0.2-fold increase to about a 1.5-fold increase, about a 0.2-fold increase to about a 1.4-fold increase, about a 0.2-fold increase to about a 1.2-fold increase, about a 0.2-fold increase to about a 1.0-fold increase, about a 0.2-fold increase to about a 0.9-fold increase, about a 0.2-fold increase to about a 0.8-fold increase, about a 0.2-fold increase to about a 0.7-fold increase, about a 0.2-fold increase to about a 0.6-fold increase, about a 0.2-fold increase to about a 0.5-fold increase, about a 0.2-fold increase to about a 0.4-fold increase, about a 0.3-fold increase to about a 100-fold increase, about 0.3-fold increase to about a 90-fold increase, about 0.3-fold increase to about a 80-fold increase, about a 0.3-fold increase to about a 70-fold increase, about a 0.3-fold increase to about a 60-fold increase, about a 0.3-fold increase to about a 50-fold increase, about a 0.3-fold increase to about a 40-fold increase, about a 0.3-fold increase to about a 30-fold increase, about 0.3-fold increase to about 20-fold increase, about a 0.3-fold increase to about a 10-fold increase, about a 0.3-fold increase to about a 9.5-fold increase, about a 0.3-fold increase to about a 9.0-fold increase, about a 0.3-fold increase to about a 8.5-fold increase, about a 0.3-fold increase to about a 8.0-fold increase, about a 0.3-fold increase to about a 7.5-fold increase, about a 0.3-fold increase to about a 7.0-fold increase, about a 0.3-fold increase to about a 6.5-fold increase, about a 0.3-fold increase to about a 6.0-fold increase, about a 0.3-fold increase to about a 5.5-fold increase, about a 0.3-fold increase to about a 5.0-fold increase, about a 0.3-fold increase to about a 4.5-fold increase, about a 0.3-fold increase to about a 4.0-fold increase, about a 0.3-fold increase to about a 3.5-fold increase, about 0.3-fold increase to about a 3.0-fold increase, about a 0.3-fold increase to about a 2.8-fold increase, about a 0.3-fold increase to about a 2.6-fold increase, about a 0.3-fold increase to about a 2.5-fold increase, about a 0.3-fold increase to about a 2.4-fold increase, about a 0.3-fold increase to about a 2.2-fold increase, about a 0.3-fold increase to about a 2.0-fold increase, about a 0.3-fold increase to about a 1.8-fold increase, about a 0.3-fold increase to about a 1.6-fold increase, about a 0.3-fold increase to about a 1.5-fold increase, about a 0.3-fold increase to about a 1.4-fold increase, about a 0.3-fold increase to about a 1.2-fold increase, about a 0.3-fold increase to about a 1.0-fold increase, about a 0.3-fold increase to about a 0.9-fold increase, about a 0.3-fold increase to about a 0.8-fold increase, about a 0.3-fold increase to about a 0.7-fold increase, about a 0.3-fold increase to about a 0.6-fold increase, about a 0.3-fold increase to about a 0.5-fold increase, about a 0.4-fold increase to about a 100-fold increase, about 0.4-fold increase to about a 90-fold increase, about 0.4-fold increase to about a 80-fold increase, about a 0.4-fold increase to about a 70-fold increase, about a 0.4-fold increase to about a 60-fold increase, about a 0.4-fold increase to about a 50-fold increase, about a 0.4-fold increase to about a 40-fold increase, about a 0.4-fold increase to about a 30-fold increase, about 0.4-fold increase to about 20-fold increase, about a 0.4-fold increase to about a 10-fold increase, about a 0.4-fold increase to about a 9.5-fold increase, about a 0.4-fold increase to about a 9.0-fold increase, about a 0.4-fold increase to about a 8.5-fold increase, about a 0.4-fold increase to about a 8.0-fold increase, about a 0.4-fold increase to about a 7.5-fold increase, about a 0.4-fold increase to about a 7.0-fold increase, about a 0.4-fold increase to about a 6.5-fold increase, about a 0.4-fold increase to about a 6.0-fold increase, about a 0.4-fold increase to about a 5.5-fold increase, about a 0.4-fold increase to about a 5.0-fold increase, about a 0.4-fold increase to about a 4.5-fold increase, about a 0.4-fold increase to about a 4.0-fold increase, about a 0.4-fold increase to about a 3.5-fold increase, about 0.4-fold increase to about a 3.0-fold increase, about a 0.4-fold increase to about a 2.8-fold increase, about a 0.4-fold increase to about a 2.6-fold increase, about a 0.4-fold increase to about a 2.5-fold increase, about a 0.4-fold increase to about a 2.4-fold increase, about a 0.4-fold increase to about a 2.2-fold increase, about a 0.4-fold increase to about a 2.0-fold increase, about a 0.4-fold increase to about a 1.8-fold increase, about a 0.4-fold increase to about a 1.6-fold increase, about a 0.4-fold increase to about a 1.5-fold increase, about a 0.4-fold increase to about a 1.4-fold increase, about a 0.4-fold increase to about a 1.2-fold increase, about a 0.4-fold increase to about a 1.0-fold increase, about a 0.4-fold increase to about a 0.9-fold increase, about a 0.4-fold increase to about a 0.8-fold increase, about a 0.4-fold increase to about a 0.7-fold increase, about a 0.4-fold increase to about a 0.6-fold increase, about a 0.5-fold increase to about a 100-fold increase, about 0.5-fold increase to about a 90-fold increase, about 0.5-fold increase to about a 80-fold increase, about a 0.5-fold increase to about a 70-fold increase, about a 0.5-fold increase to about a 60-fold increase, about a 0.5-fold increase to about a 50-fold increase, about a 0.5-fold increase to about a 40-fold increase, about a 0.5-fold increase to about a 30-fold increase, about 0.5-fold increase to about 20-fold increase, about a 0.5-fold increase to about a 10-fold increase, about a 0.5-fold increase to about a 9.5-fold increase, about a 0.5-fold increase to about a 9.0-fold increase, about a 0.5-fold increase to about a 8.5-fold increase, about a 0.5-fold increase to about a 8.0-fold increase, about a 0.5-fold increase to about a 7.5-fold increase, about a 0.5-fold increase to about a 7.0-fold increase, about a 0.5-fold increase to about a 6.5-fold increase, about a 0.5-fold increase to about a 6.0-fold increase, about a 0.5-fold increase to about a 5.5-fold increase, about a 0.5-fold increase to about a 5.0-fold increase, about a 0.5-fold increase to about a 4.5-fold increase, about a 0.5-fold increase to about a 4.0-fold increase, about a 0.5-fold increase to about a 3.5-fold increase, about 0.5-fold increase to about a 3.0-fold increase, about a 0.5-fold increase to about a 2.8-fold increase, about a 0.5-fold increase to about a 2.6-fold increase, about a 0.5-fold increase to about a 2.5-fold increase, about a 0.5-fold increase to about a 2.4-fold increase, about a 0.5-fold increase to about a 2.2-fold increase, about a 0.5-fold increase to about a 2.0-fold increase, about a 0.5-fold increase to about a 1.8-fold increase, about a 0.5-fold increase to about a 1.6-fold increase, about a 0.5-fold increase to about a 1.5-fold increase, about a 0.5-fold increase to about a 1.4-fold increase, about a 0.5-fold increase to about a 1.2-fold increase, about a 0.5-fold increase to about a 1.0-fold increase, about a 0.5-fold increase to about a 0.9-fold increase, about a 0.5-fold increase to about a 0.8-fold increase, about a 0.5-fold increase to about a 0.7-fold increase, about a 0.6-fold increase to about a 100-fold increase, about 0.6-fold increase to about a 90-fold increase, about 0.6-fold increase to about a 80-fold increase, about a 0.6-fold increase to about a 70-fold increase, about a 0.6-fold increase to about a 60-fold increase, about a 0.6-fold increase to about a 50-fold increase, about a 0.6-fold increase to about a 40-fold increase, about a 0.6-fold increase to about a 30-fold increase, about 0.6-fold increase to about 20-fold increase, about a 0.6-fold increase to about a 10-fold increase, about a 0.6-fold increase to about a 9.5-fold increase, about a 0.6-fold increase to about a 9.0-fold increase, about a 0.6-fold increase to about a 8.5-fold increase, about a 0.6-fold increase to about a 8.0-fold increase, about a 0.6-fold increase to about a 7.5-fold increase, about a 0.6-fold increase to about a 7.0-fold increase, about a 0.6-fold increase to about a 6.5-fold increase, about a 0.6-fold increase to about a 6.0-fold increase, about a 0.6-fold increase to about a 5.5-fold increase, about a 0.6-fold increase to about a 5.0-fold increase, about a 0.6-fold increase to about a 4.5-fold increase, about a 0.6-fold increase to about a 4.0-fold increase, about a 0.6-fold increase to about a 3.5-fold increase, about 0.6-fold increase to about a 3.0-fold increase, about a 0.6-fold increase to about a 2.8-fold increase, about a 0.6-fold increase to about a 2.6-fold increase, about a 0.6-fold increase to about a 2.5-fold increase, about a 0.6-fold increase to about a 2.4-fold increase, about a 0.6-fold increase to about a 2.2-fold increase, about a 0.6-fold increase to about a 2.0-fold increase, about a 0.6-fold increase to about a 1.8-fold increase, about a 0.6-fold increase to about a 1.6-fold increase, about a 0.6-fold increase to about a 1.5-fold increase, about a 0.6-fold increase to about a 1.4-fold increase, about a 0.6-fold increase to about a 1.2-fold increase, about a 0.6-fold increase to about a 1.0-fold increase, about a 0.6-fold increase to about a 0.9-fold increase, about a 0.6-fold increase to about a 0.8-fold increase, about a 0.7-fold increase to about a 100-fold increase, about 0.7-fold increase to about a 90-fold increase, about 0.7-fold increase to about a 80-fold increase, about a 0.7-fold increase to about a 70-fold increase, about a 0.7-fold increase to about a 60-fold increase, about a 0.7-fold increase to about a 50-fold increase, about a 0.7-fold increase to about a 40-fold increase, about a 0.7-fold increase to about a 30-fold increase, about 0.7-fold increase to about 20-fold increase, about a 0.7-fold increase to about a 10-fold increase, about a 0.7-fold increase to about a 9.5-fold increase, about a 0.7-fold increase to about a 9.0-fold increase, about a 0.7-fold increase to about a 8.5-fold increase, about a 0.7-fold increase to about a 8.0-fold increase, about a 0.7-fold increase to about a 7.5-fold increase, about a 0.7-fold increase to about a 7.0-fold increase, about a 0.7-fold increase to about a 6.5-fold increase, about a 0.7-fold increase to about a 6.0-fold increase, about a 0.7-fold increase to about a 5.5-fold increase, about a 0.7-fold increase to about a 5.0-fold increase, about a 0.7-fold increase to about a 4.5-fold increase, about a 0.7-fold increase to about a 4.0-fold increase, about a 0.7-fold increase to about a 3.5-fold increase, about 0.7-fold increase to about a 3.0-fold increase, about a 0.7-fold increase to about a 2.8-fold increase, about a 0.7-fold increase to about a 2.6-fold increase, about a 0.7-fold increase to about a 2.5-fold increase, about a 0.7-fold increase to about a 2.4-fold increase, about a 0.7-fold increase to about a 2.2-fold increase, about a 0.7-fold increase to about a 2.0-fold increase, about a 0.7-fold increase to about a 1.8-fold increase, about a 0.7-fold increase to about a 1.6-fold increase, about a 0.7-fold increase to about a 1.5-fold increase, about a 0.7-fold increase to about a 1.4-fold increase, about a 0.7-fold increase to about a 1.2-fold increase, about a 0.7-fold increase to about a 1.0-fold increase, about a 0.7-fold increase to about a 0.9-fold increase, about a 0.8-fold increase to about a 100-fold increase, about 0.8-fold increase to about a 90-fold increase, about 0.8-fold increase to about a 80-fold increase, about a 0.8-fold increase to about a 70-fold increase, about a 0.8-fold increase to about a 60-fold increase, about a 0.8-fold increase to about a 50-fold increase, about a 0.8-fold increase to about a 40-fold increase, about a 0.8-fold increase to about a 30-fold increase, about 0.8-fold increase to about 20-fold increase, about a 0.8-fold increase to about a 10-fold increase, about a 0.8-fold increase to about a 9.5-fold increase, about a 0.8-fold increase to about a 9.0-fold increase, about a 0.8-fold increase to about a 8.5-fold increase, about a 0.8-fold increase to about a 8.0-fold increase, about a 0.8-fold increase to about a 7.5-fold increase, about a 0.8-fold increase to about a 7.0-fold increase, about a 0.8-fold increase to about a 6.5-fold increase, about a 0.8-fold increase to about a 6.0-fold increase, about a 0.8-fold increase to about a 5.5-fold increase, about a 0.8-fold increase to about a 5.0-fold increase, about a 0.8-fold increase to about a 4.5-fold increase, about a 0.8-fold increase to about a 4.0-fold increase, about a 0.8-fold increase to about a 3.5-fold increase, about 0.8-fold increase to about a 3.0-fold increase, about a 0.8-fold increase to about a 2.8-fold increase, about a 0.8-fold increase to about a 2.6-fold increase, about a 0.8-fold increase to about a 2.5-fold increase, about a 0.8-fold increase to about a 2.4-fold increase, about a 0.8-fold increase to about a 2.2-fold increase, about a 0.8-fold increase to about a 2.0-fold increase, about a 0.8-fold increase to about a 1.8-fold increase, about a 0.8-fold increase to about a 1.6-fold increase, about a 0.8-fold increase to about a 1.5-fold increase, about a 0.8-fold increase to about a 1.4-fold increase, about a 0.8-fold increase to about a 1.2-fold increase, about a 0.8-fold increase to about a 1.0-fold increase, about a 1.0-fold increase to about a 100-fold increase, about 1.0-fold increase to about a 90-fold increase, about 1.0-fold increase to about a 80-fold increase, about a 1.0-fold increase to about a 70-fold increase, about a 1.0-fold increase to about a 60-fold increase, about a 1.0-fold increase to about a 50-fold increase, about a 1.0-fold increase to about a 40-fold increase, about a 1.0-fold increase to about a 30-fold increase, about 1.0-fold increase to about 20-fold increase, about a 1.0-fold increase to about a 10-fold increase, about a 1.0-fold increase to about a 9.5-fold increase, about a 1.0-fold increase to about a 9.0-fold increase, about a 1.0-fold increase to about a 8.5-fold increase, about a 1.0-fold increase to about a 8.0-fold increase, about a 1.0-fold increase to about a 7.5-fold increase, about a 1.0-fold increase to about a 7.0-fold increase, about a 1.0-fold increase to about a 6.5-fold increase, about a 1.0-fold increase to about a 6.0-fold increase, about a 1.0-fold increase to about a 5.5-fold increase, about a 1.0-fold increase to about a 5.0-fold increase, about a 1.0-fold increase to about a 4.5-fold increase, about a 1.0-fold increase to about a 4.0-fold increase, about a 1.0-fold increase to about a 3.5-fold increase, about 1.0-fold increase to about a 3.0-fold increase, about a 1.0-fold increase to about a 2.8-fold increase, about a 1.0-fold increase to about a 2.6-fold increase, about a 1.0-fold increase to about a 2.5-fold increase, about a 1.0-fold increase to about a 2.4-fold increase, about a 1.0-fold increase to about a 2.2-fold increase, about a 1.0-fold increase to about a 2.0-fold increase, about a 1.0-fold increase to about a 1.8-fold increase, about a 1.0-fold increase to about a 1.6-fold increase, about a 1.0-fold increase to about a 1.5-fold increase, about a 1.0-fold increase to about a 1.4-fold increase, about a 1.0-fold increase to about a 1.2-fold increase, about a 1.2-fold increase to about a 100-fold increase, about 1.2-fold increase to about a 90-fold increase, about 1.2-fold increase to about a 80-fold increase, about a 1.2-fold increase to about a 70-fold increase, about a 1.2-fold increase to about a 60-fold increase, about a 1.2-fold increase to about a 50-fold increase, about a 1.2-fold increase to about a 40-fold increase, about a 1.2-fold increase to about a 30-fold increase, about 1.2-fold increase to about 20-fold increase, about a 1.2-fold increase to about a 10-fold increase, about a 1.2-fold increase to about a 9.5-fold increase, about a 1.2-fold increase to about a 9.0-fold increase, about a 1.2-fold increase to about a 8.5-fold increase, about a 1.2-fold increase to about a 8.0-fold increase, about a 1.2-fold increase to about a 7.5-fold increase, about a 1.2-fold increase to about a 7.0-fold increase, about a 1.2-fold increase to about a 6.5-fold increase, about a 1.2-fold increase to about a 6.0-fold increase, about a 1.2-fold increase to about a 5.5-fold increase, about a 1.2-fold increase to about a 5.0-fold increase, about a 1.2-fold increase to about a 4.5-fold increase, about a 1.2-fold increase to about a 4.0-fold increase, about a 1.2-fold increase to about a 3.5-fold increase, about 1.2-fold increase to about a 3.0-fold increase, about a 1.2-fold increase to about a 2.8-fold increase, about a 1.2-fold increase to about a 2.6-fold increase, about a 1.2-fold increase to about a 2.5-fold increase, about a 1.2-fold increase to about a 2.4-fold increase, about a 1.2-fold increase to about a 2.2-fold increase, about a 1.2-fold increase to about a 2.0-fold increase, about a 1.2-fold increase to about a 1.8-fold increase, about a 1.2-fold increase to about a 1.6-fold increase, about a 1.2-fold increase to about a 1.5-fold increase, about a 1.2-fold increase to about a 1.4-fold increase, about a 1.4-fold increase to about a 100-fold increase, about 1.4-fold increase to about a 90-fold increase, about 1.4-fold increase to about a 80-fold increase, about a 1.4-fold increase to about a 70-fold increase, about a 1.4-fold increase to about a 60-fold increase, about a 1.4-fold increase to about a 50-fold increase, about a 1.4-fold increase to about a 40-fold increase, about a 1.4-fold increase to about a 30-fold increase, about 1.4-fold increase to about 20-fold increase, about a 1.4-fold increase to about a 10-fold increase, about a 1.4-fold increase to about a 9.5-fold increase, about a 1.4-fold increase to about a 9.0-fold increase, about a 1.4-fold increase to about a 8.5-fold increase, about a 1.4-fold increase to about a 8.0-fold increase, about a 1.4-fold increase to about a 7.5-fold increase, about a 1.4-fold increase to about a 7.0-fold increase, about a 1.4-fold increase to about a 6.5-fold increase, about a 1.4-fold increase to about a 6.0-fold increase, about a 1.4-fold increase to about a 5.5-fold increase, about a 1.4-fold increase to about a 5.0-fold increase, about a 1.4-fold increase to about a 4.5-fold increase, about a 1.4-fold increase to about a 4.0-fold increase, about a 1.4-fold increase to about a 3.5-fold increase, about 1.4-fold increase to about a 3.0-fold increase, about a 1.4-fold increase to about a 2.8-fold increase, about a 1.4-fold increase to about a 2.6-fold increase, about a 1.4-fold increase to about a 2.5-fold increase, about a 1.4-fold increase to about a 2.4-fold increase, about a 1.4-fold increase to about a 2.2-fold increase, about a 1.4-fold increase to about a 2.0-fold increase, about a 1.4-fold increase to about a 1.8-fold increase, about a 1.4-fold increase to about a 1.6-fold increase, about a 1.6-fold increase to about a 10-fold increase, about a 1.6-fold increase to about a 100-fold increase, about 1.6-fold increase to about a 90-fold increase, about 1.6-fold increase to about a 80-fold increase, about a 1.6-fold increase to about a 70-fold increase, about a 1.6-fold increase to about a 60-fold increase, about a 1.6-fold increase to about a 50-fold increase, about a 1.6-fold increase to about a 40-fold increase, about a 1.6-fold increase to about a 30-fold increase, about 1.6-fold increase to about 20-fold increase, about a 1.6-fold increase to about a 9.5-fold increase, about a 1.6-fold increase to about a 9.0-fold increase, about a 1.6-fold increase to about a 8.5-fold increase, about a 1.6-fold increase to about a 8.0-fold increase, about a 1.6-fold increase to about a 7.5-fold increase, about a 1.6-fold increase to about a 7.0-fold increase, about a 1.6-fold increase to about a 6.5-fold increase, about a 1.6-fold increase to about a 6.0-fold increase, about a 1.6-fold increase to about a 5.5-fold increase, about a 1.6-fold increase to about a 5.0-fold increase, about a 1.6-fold increase to about a 4.5-fold increase, about a 1.6-fold increase to about a 4.0-fold increase, about a 1.6-fold increase to about a 3.5-fold increase, about 1.6-fold increase to about a 3.0-fold increase, about a 1.6-fold increase to about a 2.8-fold increase, about a 1.6-fold increase to about a 2.6-fold increase, about a 1.6-fold increase to about a 2.5-fold increase, about a 1.6-fold increase to about a 2.4-fold increase, about a 1.6-fold increase to about a 2.2-fold increase, about a 1.6-fold increase to about a 2.0-fold increase, about a 1.6-fold increase to about a 1.8-fold increase, about a 1.8-fold increase to about a 100-fold increase, about 1.8-fold increase to about a 90-fold increase, about 1.8-fold increase to about a 80-fold increase, about a 1.8-fold increase to about a 70-fold increase, about a 1.8-fold increase to about a 60-fold increase, about a 1.8-fold increase to about a 50-fold increase, about a 1.8-fold increase to about a 40-fold increase, about a 1.8-fold increase to about a 30-fold increase, about 1.8-fold increase to about 20-fold increase, about a 1.8-fold increase to about a 10-fold increase, about a 1.8-fold increase to about a 9.5-fold increase, about a 1.8-fold increase to about a 9.0-fold increase, about a 1.8-fold increase to about a 8.5-fold increase, about a 1.8-fold increase to about a 8.0-fold increase, about a 1.8-fold increase to about a 7.5-fold increase, about a 1.8-fold increase to about a 7.0-fold increase, about a 1.8-fold increase to about a 6.5-fold increase, about a 1.8-fold increase to about a 6.0-fold increase, about a 1.8-fold increase to about a 5.5-fold increase, about a 1.8-fold increase to about a 5.0-fold increase, about a 1.8-fold increase to about a 4.5-fold increase, about a 1.8-fold increase to about a 4.0-fold increase, about a 1.8-fold increase to about a 3.5-fold increase, about 1.8-fold increase to about a 3.0-fold increase, about a 1.8-fold increase to about a 2.8-fold increase, about a 1.8-fold increase to about a 2.6-fold increase, about a 1.8-fold increase to about a 2.5-fold increase, about a 1.8-fold increase to about a 2.4-fold increase, about a 1.8-fold increase to about a 2.2-fold increase, about a 1.8-fold increase to about a 2.0-fold increase, about a 2.0-fold increase to about a 100-fold increase, about 2.0-fold increase to about a 90-fold increase, about 2.0-fold increase to about a 80-fold increase, about a 2.0-fold increase to about a 70-fold increase, about a 2.0-fold increase to about a 60-fold increase, about a 2.0-fold increase to about a 50-fold increase, about a 2.0-fold increase to about a 40-fold increase, about a 2.0-fold increase to about a 30-fold increase, about 2.0-fold increase to about 20-fold increase, about a 2.0-fold increase to about a 10-fold increase, about a 2.0-fold increase to about a 9.5-fold increase, about a 2.0-fold increase to about a 9.0-fold increase, about a 2.0-fold increase to about a 8.5-fold increase, about a 2.0-fold increase to about a 8.0-fold increase, about a 2.0-fold increase to about a 7.5-fold increase, about a 2.0-fold increase to about a 7.0-fold increase, about a 2.0-fold increase to about a 6.5-fold increase, about a 2.0-fold increase to about a 6.0-fold increase, about a 2.0-fold increase to about a 5.5-fold increase, about a 2.0-fold increase to about a 5.0-fold increase, about a 2.0-fold increase to about a 4.5-fold increase, about a 2.0-fold increase to about a 4.0-fold increase, about a 2.0-fold increase to about a 3.5-fold increase, about 2.0-fold increase to about a 3.0-fold increase, about a 2.0-fold increase to about a 2.8-fold increase, about a 2.0-fold increase to about a 2.6-fold increase, about a 2.0-fold increase to about a 2.5-fold increase, about a 2.0-fold increase to about a 2.4-fold increase, about a 2.0-fold increase to about a 2.2-fold increase, about a 2.2-fold increase to about a 100-fold increase, about 2.2-fold increase to about a 90-fold increase, about 2.2-fold increase to about a 80-fold increase, about a 2.2-fold increase to about a 70-fold increase, about a 2.2-fold increase to about a 60-fold increase, about a 2.2-fold increase to about a 50-fold increase, about a 2.2-fold increase to about a 40-fold increase, about a 2.2-fold increase to about a 30-fold increase, about 2.2-fold increase to about 20-fold increase, about a 2.2-fold increase to about a 10-fold increase, about a 2.2-fold increase to about a 9.5-fold increase, about a 2.2-fold increase to about a 9.0-fold increase, about a 2.2-fold increase to about a 8.5-fold increase, about a 2.2-fold increase to about a 8.0-fold increase, about a 2.2-fold increase to about a 7.5-fold increase, about a 2.2-fold increase to about a 7.0-fold increase, about a 2.2-fold increase to about a 6.5-fold increase, about a 2.2-fold increase to about a 6.0-fold increase, about a 2.2-fold increase to about a 5.5-fold increase, about a 2.2-fold increase to about a 5.0-fold increase, about a 2.2-fold increase to about a 4.5-fold increase, about a 2.2-fold increase to about a 4.0-fold increase, about a 2.2-fold increase to about a 3.5-fold increase, about 2.2-fold increase to about a 3.0-fold increase, about a 2.2-fold increase to about a 2.8-fold increase, about a 2.2-fold increase to about a 2.6-fold increase, about a 2.2-fold increase to about a 2.5-fold increase, about a 2.2-fold increase to about a 2.4-fold increase, about a 2.4-fold increase to about a 100-fold increase, about 2.4-fold increase to about a 90-fold increase, about 2.4-fold increase to about a 80-fold increase, about a 2.4-fold increase to about a 70-fold increase, about a 2.4-fold increase to about a 60-fold increase, about a 2.4-fold increase to about a 50-fold increase, about a 2.4-fold increase to about a 40-fold increase, about a 2.4-fold increase to about a 30-fold increase, about 2.4-fold increase to about 20-fold increase, about a 2.4-fold increase to about a 10-fold increase, about a 2.4-fold increase to about a 9.5-fold increase, about a 2.4-fold increase to about a 9.0-fold increase, about a 2.4-fold increase to about a 8.5-fold increase, about a 2.4-fold increase to about a 8.0-fold increase, about a 2.4-fold increase to about a 7.5-fold increase, about a 2.4-fold increase to about a 7.0-fold increase, about a 2.4-fold increase to about a 6.5-fold increase, about a 2.4-fold increase to about a 6.0-fold increase, about a 2.4-fold increase to about a 5.5-fold increase, about a 2.4-fold increase to about a 5.0-fold increase, about a 2.4-fold increase to about a 4.5-fold increase, about a 2.4-fold increase to about a 4.0-fold increase, about a 2.4-fold increase to about a 3.5-fold increase, about 2.4-fold increase to about a 3.0-fold increase, about a 2.4-fold increase to about a 2.8-fold increase, about a 2.4-fold increase to about a 2.6-fold increase, about a 2.6-fold increase to about a 100-fold increase, about 2.6-fold increase to about a 90-fold increase, about 2.6-fold increase to about a 80-fold increase, about a 2.6-fold increase to about a 70-fold increase, about a 2.6-fold increase to about a 60-fold increase, about a 2.6-fold increase to about a 50-fold increase, about a 2.6-fold increase to about a 40-fold increase, about a 2.6-fold increase to about a 30-fold increase, about 2.6-fold increase to about 20-fold increase, about a 2.6-fold increase to about a 10-fold increase, about a 2.6-fold increase to about a 9.5-fold increase, about a 2.6-fold increase to about a 9.0-fold increase, about a 2.6-fold increase to about a 8.5-fold increase, about a 2.6-fold increase to about a 8.0-fold increase, about a 2.6-fold increase to about a 7.5-fold increase, about a 2.6-fold increase to about a 7.0-fold increase, about a 2.6-fold increase to about a 6.5-fold increase, about a 2.6-fold increase to about a 6.0-fold increase, about a 2.6-fold increase to about a 5.5-fold increase, about a 2.6-fold increase to about a 5.0-fold increase, about a 2.6-fold increase to about a 4.5-fold increase, about a 2.6-fold increase to about a 4.0-fold increase, about a 2.6-fold increase to about a 3.5-fold increase, about 2.6-fold increase to about a 3.0-fold increase, about a 2.6-fold increase to about a 2.8-fold increase, about a 2.8-fold increase to about a 100-fold increase, about 2.8-fold increase to about a 90-fold increase, about 2.8-fold increase to about a 80-fold increase, about a 2.8-fold increase to about a 70-fold increase, about a 2.8-fold increase to about a 60-fold increase, about a 2.8-fold increase to about a 50-fold increase, about a 2.8-fold increase to about a 40-fold increase, about a 2.8-fold increase to about a 30-fold increase, about 2.8-fold increase to about 20-fold increase, about a 2.8-fold increase to about a 10-fold increase, about a 2.8-fold increase to about a 9.5-fold increase, about a 2.8-fold increase to about a 9.0-fold increase, about a 2.8-fold increase to about a 8.5-fold increase, about a 2.8-fold increase to about a 8.0-fold increase, about a 2.8-fold increase to about a 7.5-fold increase, about a 2.8-fold increase to about a 7.0-fold increase, about a 2.8-fold increase to about a 6.5-fold increase, about a 2.8-fold increase to about a 6.0-fold increase, about a 2.8-fold increase to about a 5.5-fold increase, about a 2.8-fold increase to about a 5.0-fold increase, about a 2.8-fold increase to about a 4.5-fold increase, about a 2.8-fold increase to about a 4.0-fold increase, about a 2.8-fold increase to about a 3.5-fold increase, about 2.8-fold increase to about a 3.0-fold increase, about a 3.0-fold increase to about a 100-fold increase, about 3.0-fold increase to about a 90-fold increase, about 3.0-fold increase to about a 80-fold increase, about a 3.0-fold increase to about a 70-fold increase, about a 3.0-fold increase to about a 60-fold increase, about a 3.0-fold increase to about a 50-fold increase, about a 3.0-fold increase to about a 40-fold increase, about a 3.0-fold increase to about a 30-fold increase, about 3.0-fold increase to about 20-fold increase, about a 3.0-fold increase to about a 10-fold increase, about a 3.0-fold increase to about a 9.5-fold increase, about a 3.0-fold increase to about a 9.0-fold increase, about a 3.0-fold increase to about a 8.5-fold increase, about a 3.0-fold increase to about a 8.0-fold increase, about a 3.0-fold increase to about a 7.5-fold increase, about a 3.0-fold increase to about a 7.0-fold increase, about a 3.0-fold increase to about a 6.5-fold increase, about a 3.0-fold increase to about a 6.0-fold increase, about a 3.0-fold increase to about a 5.5-fold increase, about a 3.0-fold increase to about a 5.0-fold increase, about a 3.0-fold increase to about a 4.5-fold increase, about a 3.0-fold increase to about a 4.0-fold increase, about a 3.0-fold increase to about a 3.5-fold increase, about a 3.5-fold increase to about a 100-fold increase, about 3.5-fold increase to about a 90-fold increase, about 3.5-fold increase to about a 80-fold increase, about a 3.5-fold increase to about a 70-fold increase, about a 3.5-fold increase to about a 60-fold increase, about a 3.5-fold increase to about a 50-fold increase, about a 3.5-fold increase to about a 40-fold increase, about a 3.5-fold increase to about a 30-fold increase, about 3.5-fold increase to about 20-fold increase, about a 3.5-fold increase to about a 10-fold increase, about a 3.5-fold increase to about a 9.5-fold increase, about a 3.5-fold increase to about a 9.0-fold increase, about a 3.5-fold increase to about a 8.5-fold increase, about a 3.5-fold increase to about a 8.0-fold increase, about a 3.5-fold increase to about a 7.5-fold increase, about a 3.5-fold increase to about a 7.0-fold increase, about a 3.5-fold increase to about a 6.5-fold increase, about a 3.5-fold increase to about a 6.0-fold increase, about a 3.5-fold increase to about a 5.5-fold increase, about a 3.5-fold increase to about a 5.0-fold increase, about a 3.5-fold increase to about a 4.5-fold increase, about a 3.5-fold increase to about a 4.0-fold increase, about a 4.0-fold increase to about a 100-fold increase, about 4.0-fold increase to about a 90-fold increase, about 4.0-fold increase to about a 80-fold increase, about a 4.0-fold increase to about a 70-fold increase, about a 4.0-fold increase to about a 60-fold increase, about a 4.0-fold increase to about a 50-fold increase, about a 4.0-fold increase to about a 40-fold increase, about a 4.0-fold increase to about a 30-fold increase, about 4.0-fold increase to about 20-fold increase, about a 4.0-fold increase to about a 10-fold increase, about a 4.0-fold increase to about a 9.5-fold increase, about a 4.0-fold increase to about a 9.0-fold increase, about a 4.0-fold increase to about a 8.5-fold increase, about a 4.0-fold increase to about a 8.0-fold increase, about a 4.0-fold increase to about a 7.5-fold increase, about a 4.0-fold increase to about a 7.0-fold increase, about a 4.0-fold increase to about a 6.5-fold increase, about a 4.0-fold increase to about a 6.0-fold increase, about a 4.0-fold increase to about a 5.5-fold increase, about a 4.0-fold increase to about a 5.0-fold increase, about a 4.0-fold increase to about a 4.5-fold increase, about a 4.5-fold increase to about a 100-fold increase, about 4.5-fold increase to about a 90-fold increase, about 4.5-fold increase to about a 80-fold increase, about a 4.5-fold increase to about a 70-fold increase, about a 4.5-fold increase to about a 60-fold increase, about a 4.5-fold increase to about a 50-fold increase, about a 4.5-fold increase to about a 40-fold increase, about a 4.5-fold increase to about a 30-fold increase, about 4.5-fold increase to about 20-fold increase, about a 4.5-fold increase to about a 10-fold increase, about a 4.5-fold increase to about a 9.5-fold increase, about a 4.5-fold increase to about a 9.0-fold increase, about a 4.5-fold increase to about a 8.5-fold increase, about a 4.5-fold increase to about a 8.0-fold increase, about a 4.5-fold increase to about a 7.5-fold increase, about a 4.5-fold increase to about a 7.0-fold increase, about a 4.5-fold increase to about a 6.5-fold increase, about a 4.5-fold increase to about a 6.0-fold increase, about a 4.5-fold increase to about a 5.5-fold increase, about a 4.5-fold increase to about a 5.0-fold increase, about a 5.0-fold increase to about a 100-fold increase, about 5.0-fold increase to about a 90-fold increase, about 5.0-fold increase to about a 80-fold increase, about a 5.0-fold increase to about a 70-fold increase, about a 5.0-fold increase to about a 60-fold increase, about a 5.0-fold increase to about a 50-fold increase, about a 5.0-fold increase to about a 40-fold increase, about a 5.0-fold increase to about a 30-fold increase, about 5.0-fold increase to about 20-fold increase, about a 5.0-fold increase to about a 10-fold increase, about a 5.0-fold increase to about a 9.5-fold increase, about a 5.0-fold increase to about a 9.0-fold increase, about a 5.0-fold increase to about a 8.5-fold increase, about a 5.0-fold increase to about a 8.0-fold increase, about a 5.0-fold increase to about a 7.5-fold increase, about a 5.0-fold increase to about a 7.0-fold increase, about a 5.0-fold increase to about a 6.5-fold increase, about a 5.0-fold increase to about a 6.0-fold increase, about a 5.0-fold increase to about a 5.5-fold increase, about a 5.5-fold increase to about a 100-fold increase, about 5.5-fold increase to about a 90-fold increase, about 5.5-fold increase to about a 80-fold increase, about a 5.5-fold increase to about a 70-fold increase, about a 5.5-fold increase to about a 60-fold increase, about a 5.5-fold increase to about a 50-fold increase, about a 5.5-fold increase to about a 40-fold increase, about a 5.5-fold increase to about a 30-fold increase, about 5.5-fold increase to about 20-fold increase, about a 5.5-fold increase to about a 10-fold increase, about a 5.5-fold increase to about a 9.5-fold increase, about a 5.5-fold increase to about a 9.0-fold increase, about a 5.5-fold increase to about a 8.5-fold increase, about a 5.5-fold increase to about a 8.0-fold increase, about a 5.5-fold increase to about a 7.5-fold increase, about a 5.5-fold increase to about a 7.0-fold increase, about a 5.5-fold increase to about a 6.5-fold increase, about a 5.5-fold increase to about a 6.0-fold increase, about a 6.0-fold increase to about a 100-fold increase, about 6.0-fold increase to about a 90-fold increase, about 6.0-fold increase to about a 80-fold increase, about a 6.0-fold increase to about a 70-fold increase, about a 6.0-fold increase to about a 60-fold increase, about a 6.0-fold increase to about a 50-fold increase, about a 6.0-fold increase to about a 40-fold increase, about a 6.0-fold increase to about a 30-fold increase, about 6.0-fold increase to about 20-fold increase, about a 6.0-fold increase to about a 10-fold increase, about a 6.0-fold increase to about a 9.5-fold increase, about a 6.0-fold increase to about a 9.0-fold increase, about a 6.0-fold increase to about a 8.5-fold increase, about a 6.0-fold increase to about a 8.0-fold increase, about a 6.0-fold increase to about a 7.5-fold increase, about a 6.0-fold increase to about a 7.0-fold increase, about a 6.0-fold increase to about a 6.5-fold increase, about a 6.5-fold increase to about a 100-fold increase, about 6.5-fold increase to about a 90-fold increase, about 6.5-fold increase to about a 80-fold increase, about a 6.5-fold increase to about a 70-fold increase, about a 6.5-fold increase to about a 60-fold increase, about a 6.5-fold increase to about a 50-fold increase, about a 6.5-fold increase to about a 40-fold increase, about a 6.5-fold increase to about a 30-fold increase, about 6.5-fold increase to about 20-fold increase, about a 6.5-fold increase to about a 10-fold increase, about a 6.5-fold increase to about a 9.5-fold increase, about a 6.5-fold increase to about a 9.0-fold increase, about a 6.5-fold increase to about a 8.5-fold increase, about a 6.5-fold increase to about a 8.0-fold increase, about a 6.5-fold increase to about a 7.5-fold increase, about a 6.5-fold increase to about a 7.0-fold increase, about a 7.0-fold increase to about a 100-fold increase, about 7.0-fold increase to about a 90-fold increase, about 7.0-fold increase to about a 80-fold increase, about a 7.0-fold increase to about a 70-fold increase, about a 7.0-fold increase to about a 60-fold increase, about a 7.0-fold increase to about a 50-fold increase, about a 7.0-fold increase to about a 40-fold increase, about a 7.0-fold increase to about a 30-fold increase, about 7.0-fold increase to about 20-fold increase, about a 7.0-fold increase to about a 10-fold increase, about a 7.0-fold increase to about a 9.5-fold increase, about a 7.0-fold increase to about a 9.0-fold increase, about a 7.0-fold increase to about a 8.5-fold increase, about a 7.0-fold increase to about a 8.0-fold increase, about a 7.0-fold increase to about a 7.5-fold increase, about a 7.5-fold increase to about a 100-fold increase, about 7.5-fold increase to about a 90-fold increase, about 7.5-fold increase to about a 80-fold increase, about a 7.5-fold increase to about a 70-fold increase, about a 7.5-fold increase to about a 60-fold increase, about a 7.5-fold increase to about a 50-fold increase, about a 7.5-fold increase to about a 40-fold increase, about a 7.5-fold increase to about a 30-fold increase, about 7.5-fold increase to about 20-fold increase, about a 7.5-fold increase to about a 10-fold increase, about a 7.5-fold increase to about a 9.5-fold increase, about a 7.5-fold increase to about a 9.0-fold increase, about a 7.5-fold increase to about a 8.5-fold increase, about a 7.5-fold increase to about a 8.0-fold increase, about a 8.0-fold increase to about a 100-fold increase, about 8.0-fold increase to about a 90-fold increase, about 8.0-fold increase to about a 80-fold increase, about a 8.0-fold increase to about a 70-fold increase, about a 8.0-fold increase to about a 60-fold increase, about a 8.0-fold increase to about a 50-fold increase, about a 8.0-fold increase to about a 40-fold increase, about a 8.0-fold increase to about a 30-fold increase, about 8.0-fold increase to about 20-fold increase, about a 8.0-fold increase to about a 10-fold increase, about a 8.0-fold increase to about a 9.5-fold increase, about a 8.0-fold increase to about a 9.0-fold increase, about a 8.0-fold increase to about a 8.5-fold increase, about a 8.5-fold increase to about a 100-fold increase, about 8.5-fold increase to about a 90-fold increase, about 8.5-fold increase to about a 80-fold increase, about a 8.5-fold increase to about a 70-fold increase, about a 8.5-fold increase to about a 60-fold increase, about a 8.5-fold increase to about a 50-fold increase, about a 8.5-fold increase to about a 40-fold increase, about a 8.5-fold increase to about a 30-fold increase, about 8.5-fold increase to about 20-fold increase, about a 8.5-fold increase to about a 10-fold increase, about a 8.5-fold increase to about a 9.5-fold increase, about a 8.5-fold increase to about a 9.0-fold increase, about a 9.0-fold increase to about a 100-fold increase, about 9.0-fold increase to about a 90-fold increase, about 9.0-fold increase to about a 80-fold increase, about a 9.0-fold increase to about a 70-fold increase, about a 9.0-fold increase to about a 60-fold increase, about a 9.0-fold increase to about a 50-fold increase, about a 9.0-fold increase to about a 40-fold increase, about a 9.0-fold increase to about a 30-fold increase, about 9.0-fold increase to about 20-fold increase, about a 9.0-fold increase to about a 10-fold increase, about a 9.0-fold increase to about a 9.5-fold increase, about a 9.5-fold increase to about a 100-fold increase, about 9.5-fold increase to about a 90-fold increase, about 9.5-fold increase to about a 80-fold increase, about a 9.5-fold increase to about a 70-fold increase, about a 9.5-fold increase to about a 60-fold increase, about a 9.5-fold increase to about a 50-fold increase, about a 9.5-fold increase to about a 40-fold increase, about a 9.5-fold increase to about a 30-fold increase, about 9.5-fold increase to about 20-fold increase, about a 9.5-fold increase to about a 10-fold increase, about a 10-fold increase to about a 100-fold increase, about 10-fold increase to about a 90-fold increase, about 10-fold increase to about a 80-fold increase, about a 10-fold increase to about a 70-fold increase, about a 10-fold increase to about a 60-fold increase, about a 10-fold increase to about a 50-fold increase, about a 10-fold increase to about a 40-fold increase, about a 10-fold increase to about a 30-fold increase, about 10-fold increase to about 20-fold increase, about a 20-fold increase to about a 100-fold increase, about 20-fold increase to about a 90-fold increase, about 20-fold increase to about a 80-fold increase, about a 20-fold increase to about a 70-fold increase, about a 20-fold increase to about a 60-fold increase, about a 20-fold increase to about a 50-fold increase, about a 20-fold increase to about a 40-fold increase, about a 20-fold increase to about a 30-fold increase, about a 30-fold increase to about a 100-fold increase, about 30-fold increase to about a 90-fold increase, about 30-fold increase to about a 80-fold increase, about a 30-fold increase to about a 70-fold increase, about a 30-fold increase to about a 60-fold increase, about a 30-fold increase to about a 50-fold increase, about a 30-fold increase to about a 40-fold increase, about a 40-fold increase to about a 100-fold increase, about 40-fold increase to about a 90-fold increase, about 40-fold increase to about a 80-fold increase, about a 40-fold increase to about a 70-fold increase, about a 40-fold increase to about a 60-fold increase, about a 40-fold increase to about a 50-fold increase, about a 50-fold increase to about a 100-fold increase, about 50-fold increase to about a 90-fold increase, about 50-fold increase to about a 80-fold increase, about a 50-fold increase to about a 70-fold increase, about a 50-fold increase to about a 60-fold increase, about a 60-fold increase to about a 100-fold increase, about 60-fold increase to about a 90-fold increase, about 60-fold increase to about a 80-fold increase, about a 60-fold increase to about a 70-fold increase, about a 70-fold increase to about a 100-fold increase, about 70-fold increase to about a 90-fold increase, about 70-fold increase to about a 80-fold increase, about a 80-fold increase to about a 100-fold increase, about 80-fold increase to about a 90-fold increase, or about a 90-fold increase to about a 100-fold increase) in toxin liberation in the target mammalian cell (e.g., any of the target mammalian cells described herein) as compared to a composition including the same amount of a control ABPC (e.g., any of the exemplary control ABPCs described herein).

[0643] In some examples of any of the ABPCs described herein, a composition including the ABPC (e.g., any of the ABPCs described herein) can provide for an increase (e.g., a detectable increase) (e.g., at least a 1% increase, at least a 2% increase, at least a 5% increase, at least a 10% increase, at least a 15% increase, at least a 20% increase, at least a 25% increase, at least a 30% increase, at least a 35% increase, at least a 40% increase, at least a 45% increase, at least a 50% increase, at least a 55% increase, at least a 60% increase, at least a 65% increase, at least a 70% increase, at least a 75% increase, at least a 80% increase, at least a 85% increase, at least a 90% increase, at least a 95% increase, at least a 100% increase, at least a 120% increase, at least a 140% increase, at least a 160% increase, at least a 180% increase, at least a 200% increase, at least a 250% increase, at least a 300% increase, at least a 350% increase, at least a 400% increase, at least a 450% increase, at least a 500% increase, at least a 1,000% increase, at least a 2,000% increase, at least a 3,000% increase, at least a 4,000% increase, at least a 5,000% increase, at least a 6,000% increase, at least a 7,000% increase, at least a 8,000% increase, at a least a 9,000% increase, or at least a 10,000% increase, or about a 1% increase to about a 10,000% increase (e.g., or any of the subranges of this range described herein)) in target mammalian cell killing (e.g., any of the exemplary target mammalian cells described herein) as compared to a composition including the same amount of a control ABPC (e.g., any of the exemplary control ABPCs described herein).

[0644] In some examples of any of the ABPCs described herein, a composition including the ABPC (e.g., any of the ABPCs described herein) can provide for an increase (e.g., a detectable increase) (e.g., at least a 0.1-fold increase, at least a 0.2-fold increase, at least a 0.3-fold increase, at least a 0.4-fold increase, at least a 0.5-fold increase, at least a 0.6-fold increase, at least a 0.7-fold increase, at least a 0.8-fold increase, at least a 0.9-fold increase, at least a 1.0-fold increase, at least a 1.2-fold increase, at least a 1.4-fold increase, at least a 1.5-fold increase, at least a 1.6-fold increase, at least a 1.8-fold increase, at least a 2.0-fold increase, at least a 2.2-fold increase, at least a 2.4-fold increase, at least a 2.5-fold increase, at least a 2.6-fold increase, at least a 2.8-fold increase, at least a 3.0-fold increase, at least a 3.5-fold increase, at least a 4.0-fold increase, at least a 4.5-fold increase, at least a 5.0-fold increase, at least a 5.5-fold increase, at least a 6.0-fold increase, at least a 6.5-fold increase, at least a 7.0-fold increase, at least a 7.5-fold increase, at least a 8.0-fold increase, at least a 8.5-fold increase, at least a 9.0-fold increase, at least a 9.5-fold increase, at least a 10-fold increase, at least a 15-fold increase, at least a 20-fold increase, at least a 25-fold increase, at least a 30-fold increase, at least a 35-fold increase, at least a 40-fold increase, at least a 40-fold increase, at least a 45-fold increase, at least a 50-fold increase, at least a 55-fold increase, at least a 60-fold increase, at least a 65-fold increase, at least a 70-fold increase, at least a 80-fold increase, at least a 85-fold increase, at least a 90-fold increase, at least a 95-fold increase, or at least a 100-fold increase, or about a 0.1-fold increase to about a 100-fold increase (or any of the subranges of this range described herein)) in target mammalian cell killing (e.g., any of the exemplary target mammalian cells described herein) as compared to a composition including the same amount of a control ABPC (e.g., any of the exemplary control ABPCs described herein).

[0645] In some examples of any of the ABPCs described herein, a composition including any of the ABPCs described herein (e.g., upon contacting target mammalian cells presenting DLL3 on their surface) results in decreased (e.g., at least a 1% decrease, at least a 5% decrease, at least a 10% decrease, at least a 15% decrease, at least a 20% decrease, at least a 25% decrease, at least a 30% decrease, at least a 35% decrease, at least a 40% decrease, at least a 45% decrease, at least a 50% decrease, at least a 55% decrease, at least a 60% decrease, at least a 65% decrease, at least a 70% decrease, at least a 75% decrease, at least a 80% decrease, at least a 85% decrease, at least a 90% decrease, at least a 95% decrease, or at least a 99% decrease, about a 1% decrease to about a 99% decrease, or any of the subranges of this range described herein) IC₅₀ (for target mammalian cell killing) as compared to the IC50 for a composition including the same amount of a control ABPC (e.g., any of the control ABPCs described herein) (e.g., upon contacting the same target mammalian cells).

[0646] In some examples of any of the ABPCs described herein, a composition including any of the ABPCs described herein (e.g., upon contacting target mammalian cells presenting DLL3 on their surface) can provide for an increase (e.g., at least a 0.1-fold increase, at least a 0.2-fold increase, at least a 0.4-fold increase, at least a 0.6-fold increase, at least a 0.8-fold increase, at least a 1-fold increase, at least a 2-fold increase, at least a 5-fold increase, at least a 10-fold increase, at least a 15-fold increase, at least a 20-fold increase, at least a 25-fold increase, at least a 30-fold increase, at least a 35-fold increase, at least a 40-fold increase, at least a 45-fold increase, at least a 50-fold increase, at least a 55-fold increase, at least a 60-fold increase, at least a 65-fold increase, at least a 70-fold increase, at least a 75-fold increase, at least a 80-fold increase, at least a 85-fold increase, at least a 90-fold increase, at least a 95-fold increase, or at least a 100-fold increase, or about a 0.1-fold increase to about 500-fold increase (or any of the subranges of this range described herein) in the ratio of K_{D} on target mammalian cells presenting DLL3 on their surface at a neutral pH (a pH of about 7.0 to about 8.0) to IC50 at the neutral pH on the same target cells, e.g., as compared to a control ABPC (e.g., any of the exemplary control ABPCs described herein).

[0647] In some examples of any of the ABPCs described herein, a composition including the ABPC (e.g., any of the ABPCs described herein) can provide for an increase (e.g., a detectable increase) (e.g., at least a 1% increase, at least a 2% increase, at least a 5% increase, at least a 10% increase, at least a 15% increase, at least a 20% increase, at least a 25% increase, at least a 30% increase, at least a 35% increase, at least a 40% increase, at least a 45% increase, at least a 50% increase, at least a 55% increase, at least a 60% increase, at least a 65% increase, at least a 70% increase, at least a 75% increase, at least a 80% increase, at least a 85% increase, at least a 90% increase, at least a 95% increase, at least a 100% increase, at least a 120% increase, at least a 140% increase, at least a 160% increase, at least a 180% increase, at least a 200% increase, at least a 250% increase, at least a 300% increase, at least a 350% increase, at least a 400% increase, at least a 450% increase, at least a 500% increase, at least a 1,000% increase, at least a 2,000% increase, at least a 3,000% increase, at least a 4,000% increase, at least a 5,000% increase, at least a 6,000% increase, at least a 7,000% increase, at least a 8,000% increase, at least a 9,000% increase, or at least a 10,000% increase, or about a 1% increase to about a 10,000% increase (e.g., or any of the subranges of this range described herein)) in endolysosomal delivery in the target mammalian cell (e.g., any of the exemplary target mammalian cells described herein) as compared to a composition including the same amount of a control ABPC (e.g., any of the exemplary control ABPCs described herein).

[0648] In some examples of any of the ABPCs described herein, a composition including the ABPC (e.g., any of the ABPCs described herein) can provide for an increase (e.g., a detectable increase) (e.g., at least a 0.1-fold increase, at least a 0.2-fold increase, at least a 0.3-fold increase, at least a 0.4-fold increase, at least a 0.5-fold increase, at least a 0.6-fold increase, at least a 0.7-fold increase, at least a 0.8-fold increase, at least a 0.9-fold increase, at least a 1.0-fold increase, at least a 1.2-fold increase, at least a 1.4-fold increase, at least a 1.5-fold increase, at least a 1.6-fold increase, at least a 1.8-fold increase, at least a 2.0-fold increase, at least a 2.2-fold increase, at least a 2.4-fold increase, at least a 2.5-fold increase, at least a 2.6-fold increase, at least a 2.8-fold increase, at least a 3.0-fold increase, at least a 3.5-fold increase, at least a 4.0-fold increase, at least a 4.5-fold increase, at least a 5.0-fold increase, at least a 5.5-fold increase, at least a 6.0-fold increase, at least a 6.5-fold increase, at least a 7.0-fold increase, at least a 7.5-fold increase, at least a 8.0-fold increase, at least a 8.5-fold increase, at least a 9.0-fold increase, at least a 9.5-fold increase, at least a 10-fold increase, at least a 15-fold increase, at least a 20-fold increase, at least a 25-fold increase, at least a 30-fold increase, at least a 35-fold increase, at least a 40-fold increase, at least a 45-fold increase, at least a 50-fold increase, at least a 55-fold increase, at least a 60-fold increase, at least a 65-fold increase, at least a 70-fold increase, at least a 75-fold increase, at least a 80-fold increase, at least a 85-fold increase, at least a 90-fold increase, at least a 95-fold increase, or at least a 100-fold increase, or about a 0.1-fold increase to about a 100-fold increase (or any of the subranges of this range described herein)) in endolysosomal delivery in the target mammalian cell (e.g., any of the exemplary target mammalian cells described herein) as compared to a composition including the same amount of a control ABPC (e.g., any of the exemplary control ABPCs described herein).

[0649] In examples of any of the ABPCs described herein, the target mammalian cell does not express an FcRn receptor, or expresses a lower (e.g., a detectably lower) level (e.g., at least a 1% decreased, at least a 2% decreased, at least a 5% decreased, at least a 10% decrease, at least a 15% decreased, at least a 20% decreased, at least a 25% decreased, at least a 30% decreased, at least a 35% decreased, at least a 40% decreased, at least a 45% decreased, at least a 50% decreased, at least a 55% decreased, at least a 60% decreased, at least a 65% decreased, at least a 70% decreased, at least a 75% decreased, at least a 80% decreased, at least a 85% decreased, at least a 90% decreased, at least a 95% decreased, or at least a 99% decreased level) of FcRn receptor as compared to a FcRn expressing control cell (e.g., HUVEC—ThermoFisher #C0035C). In some examples of any of the ABPCs described herein, the target mammalian cell is a cancer cell. In some examples of any of the ABPCs described herein, the ABPC is cytotoxic or cytostatic to the target mammalian cell.

[0650] In some examples of any of the ABPCs described herein, a composition including any of the ABPCs described herein (e.g., upon administration to a subject) results in less (e.g., a 1% decrease to about a 99% decrease, or any of the subranges of this range described herein) of a reduction in the level of DLL3 presented on the surface of the target cell as compared to a composition including the same amount of a control ABPC (e.g., any of the control ABPCs described herein). In some examples of any of the ABPCs described herein, the composition does not result in a detectable reduction in the level of the DLL3 presented on the surface of the target mammalian cell.

[0651] In some examples of any of the ABPCs described herein, the ABPC is cross-reactive with a non-human primate DLL3 and a human DLL3. In some examples of any of the ABPCs described herein, the ABPC is cross-reactive with a non-human primate DLL3, a human DLL3, and one or both of rat DLL3 and a mouse DLL3. In some examples of any of the ABPCs described herein, the ABPC is cross-reactive with a non-human primate DLL3, a human DLL3, a rat DLL3, and a mouse DLL3. In some examples of any of the ABPCs described herein, the ABPC is cross-reactive with mouse DLL3 and rat DLL3. In some examples of any of the ABPCs described herein, the antigen-binding domain binds to an epitope of DLL3 that is present on the surface of cells from an Old World Monkey.

[0652] Some examples of any of the ABPCs described herein can further include a second antigen-binding domain (e.g., any of the exemplary antigen-binding domains described herein). Non-limiting aspects of these methods are described below, and can be used in any combination without limitation. Additional aspects of these methods are known in the art.

### DLL3 or Epitope of DLL3

[0653] Delta-like 3 (DLL3) is a tumor antigen that is known in the art, and is the target of therapeutic antibodies in oncology (Saunders L R et al (2015) “A DLL3-targeted antibody-drug conjugate eradicates high-grade pulmonary neuroendocrine tumor-initiating cells in vivo.” Science Translational Medicine 7(302):302ra136). The sequence of the mature Human DLL3 can be found in SEQ ID NO: 9. The sequence of the cDNA encoding the mature Human DLL3 can be found in SEQ ID NO: 10. The sequence of the extracellular domain of DLL3 can be found in SEQ ID NO: 11. The sequence of the cDNA encoding the extracellular domain of DLL3 can be found in SEQ ID NO: 12.

### Antigen-Binding Protein Constructs

[0654] Any of the antigen-binding protein constructs (ABPCs) described herein can be a single polypeptide, or can include two, three, four, five, six, seven, eight, nine, or ten (the same or different) polypeptides. In some embodiments where the ABPC is a single polypeptide, the ABPC can include a single antigen-binding domain or two antigen-binding domains. In some embodiments where the ABPC is a single polypeptide and includes two antigen-binding domains, the first and second antigen-binding domains can be identical or different from each other (and can specifically bind to the same or different antigens or epitopes).

[0655] In some embodiments where the ABPC is a single polypeptide, the first antigen-binding domain and the second antigen-binding domain (if present) can each be independently selected from the group of: a VH domain, a VHH domain, a VNAR domain, and a scFv. In some embodiments where the ABPC is a single polypeptide, the antigen-binding protein construct can be a BiTe, a (scFv)2, a nanobody, a nanobody-HSA, a DART, a TandAb, a scDiabody, a scDiabody-CH3, scFv-CH-CL-scFv, a HSAbody, scDiabody-HAS, a tandem-scFv, an Adnectin, a DARPin, a fibronectin, and a DEP conjugate. Additional examples of antigen-binding domains that can be used when the ABPC is a single polypeptide are known in the art.

[0656] A V_{H}H domain is a single monomeric variable antibody domain that can be found in camelids. A V_{NAR} domain is a single monomeric variable antibody domain that can be found in cartilaginous fish. Non-limiting aspects of V_{H}H domains and V_{NAR} domains are described in, e.g., Cromie et al., Curr. Top. Med. Chem. 15:2543-2557, 2016; De Genst et al., Dev. Comp. Immunol. 30:187-198, 2006; De Meyer et al., Trends Biotechnol. 32:263-270, 2014; Kijanka et al., Nanomedicine 10:161-174, 2015; Kovaleva et al., Expert. Opin. Biol. Ther. 14:1527-1539, 2014; Krah et al., Immunopharmacol. Immunotoxicol. 38:21-28, 2016; Mujic-Delic et al., Trends Pharmacol. Sci. 35:247-255, 2014; Muyldermans, J. Biotechnol. 74:277-302, 2001; Muyldermans et al., Trends Biochem. Sci. 26:230-235, 2001; Muyldermans, Ann. Rev. Biochem. 82:775-797, 2013; Rahbarizadeh et al., Immunol. Invest. 40:299-338, 2011; Van Audenhove et al., EBioMedicine 8:40-48, 2016; Van Bockstaele et al., Curr Opin. Investig. Drugs 10:1212-1224, 2009; Vincke et al., Methods Mol. Biol. 911:15-26, 2012; and Wesolowski et al., Med. Microbiol. Immunol. 198:157-174, 2009.

[0657] In some embodiments where the ABPC is a single polypeptide and includes two antigen-binding domains, the first antigen-binding domain and the second antigen-binding domain can both be VHH domains, or at least one antigen-binding domain can be a VHH domain. In some embodiments where the ABPC is a single polypeptide and includes two antigen-binding domains, the first antigen-binding domain and the second antigen-binding domain are both V_{NAR} domains, or at least one antigen-binding domain is a V_{NAR} domain. In some embodiments where the ABPC is a single polypeptide, the first antigen-binding domain is a scFv domain. In some embodiments where the ABPC is a single polypeptide and includes two antigen-binding domains, the first antigen-binding domain and the second antigen-binding domain can both be scFv domains, or at least one antigen-binding domain can be a scFv domain.

[0658] In some embodiments, the ABPC can include two or more polypeptides (e.g., two, three, four, five, six, seven, eight, nine, or ten polypeptides). In some embodiments where the ABPC includes two or more polypeptides, two, three, four, five or six of the polypeptides of the two or more polypeptides can be identical.

[0659] In some embodiments where the ABPC includes two or more polypeptides (e.g., two, three, four, five, six, seven, eight, nine, or ten polypeptides), two or more of the polypeptides of the ABPC can assemble (e.g., non-covalently assemble) to form one or more antigen-binding domains, e.g., an antigen-binding fragment of an antibody (e.g., any of the antigen-binding fragments of an antibody described herein), a VHH-scAb, a VHH-Fab, a Dual scFab, a F(ab′)2, a diabody, a crossMab, a DAF (two-in-one), a DAF (four-in-one), a DutaMab, a DT-IgG, a knobs-in-holes common light chain, a knobs-in-holes assembly, a charge pair, a Fab-arm exchange, a SEEDbody, a LUZ-Y, a Fcab, a κλ-body, an orthogonal Fab, a DVD-IgG, a IgG(H)-scFv, a scFv-(H)IgG, IgG(L)-scFv, scFv-(L)IgG, IgG(L,H)-Fv, IgG(H)-V, V(H)—IgG, IgG(L)-V, V(L)-IgG, KIH IgG-scFab, 2scFv-IgG, IgG-2scFv, scFv4-Ig, Zybody, DVI-IgG, Diabody-CH3, a triple body, a miniantibody, a minibody, a TriBi minibody, scFv-CH3 KIH, Fab-scFv, a F(ab′)2-scFv2, a scFv-KIH, a Fab-scFv-Fc, a tetravalent HCAb, a scDiabody-Fc, a Diabody-Fc, a tandem scFv-Fc, a VHH-Fc, a tandem VHH-Fc, a VHH-Fc KiH, a Fab-VHH-Fc, an Intrabody, a dock and lock, an ImmTAC, an IgG-IgG conjugate, a Cov-X-Body, a scFv1-PEG-scFv2, an Adnectin, a DARPin, a fibronectin, and a DEP conjugate. See, e.g., Spiess et al., Mol. Immunol. 67:95-106, 2015, incorporated in its entirety herewith, for a description of these elements. Non-limiting examples of an antigen-binding fragment of an antibody include an Fv fragment, a Fab fragment, a F(ab′)2 fragment, and a Fab′ fragment. Additional examples of an antigen-binding fragment of an antibody is an antigen-binding fragment of an IgG (e.g., an antigen-binding fragment of IgG1, IgG2, IgG3, or IgG4) (e.g., an antigen-binding fragment of a human or humanized IgG, e.g., human or humanized IgG1, IgG2, IgG3, or IgG4); an antigen-binding fragment of an IgA (e.g., an antigen-binding fragment of IgA1 or IgA2) (e.g., an antigen-binding fragment of a human or humanized IgA, e.g., a human or humanized IgA1 or IgA2); an antigen-binding fragment of an IgD (e.g., an antigen-binding fragment of a human or humanized IgD); an antigen-binding fragment of an IgE (e.g., an antigen-binding fragment of a human or humanized IgE); or an antigen-binding fragment of an IgM (e.g., an antigen-binding fragment of a human or humanized IgM).

[0660] A “Fv” fragment includes a non-covalently-linked dimer of one heavy chain variable domain and one light chain variable domain.

[0661] A “Fab” fragment includes the constant domain of the light chain and the first constant domain (C_{HI}) of the heavy chain, in addition to the heavy and light chain variable domains of the Fv fragment.

[0662] A “F(ab′)₂” fragment includes two Fab fragments joined, near the hinge region, by disulfide bonds.

[0663] A “dual variable domain immunoglobulin” or “DVD-Ig” refers to multivalent and multispecific binding proteins as described, e.g., in DiGiammarino et al., Methods Mol. Biol. 899:145-156, 2012; Jakob et al., MABs 5:358-363, 2013; and U.S. Pat. Nos. 7,612,181; 8,258,268; 8,586,714; 8,716,450; 8,722,855; 8,735,546; and 8,822,645, each of which is incorporated by reference in its entirety.

[0664] DARTs are described in, e.g., Garber, Nature Reviews Drug Discovery 13:799-801, 2014.

[0665] Additional aspects of ABPCs are known in the art.

### Antigen-Binding Domains

[0666] In some embodiments of any of the antigen-binding protein constructs (ABPCs) described herein, the dissociation rate of the first antigen-binding domain (and optionally the second antigen-binding domain, if present) at a pH of about 4.0 to about 6.5 (e.g., about 4.0 to about 6.4, about 4.0 to about 6.3, about 4.0 to about 6.2, about 4.0 to about 6.1, about 4.0 to about 6.0, about 4.0 to about 5.9, about 4.0 to about 5.8, about 4.0 to about 5.7, about 4.0 to about 5.6, about 4.0 to about 5.5, about 4.0 to about 5.4, about 4.0 to about 5.3, about 4.0 to about 5.2, about 4.0 to about 5.1, about 4.0 to about 5.0, about 4.0 to about 4.9, about 4.0 to about 4.8, about 4.0 to about 4.7, about 4.0 to about 4.6, about 4.0 to about 4.5, about 4.0 to about 4.4, about 4.0 to about 4.3, about 4.0 to about 4.2, about 4.0 to about 4.1, about 4.1 to about 6.5, about 4.1 to about 6.4, about 4.1 to about 6.3, about 4.1 to about 6.2, about 4.1 to about 6.1, about 4.1 to about 6.0, about 4.1 to about 5.9, about 4.1 to about 5.8, about 4.1 to about 5.7, about 4.1 to about 5.6, about 4.1 to about 5.5, about 4.1 to about 5.4, about 4.1 to about 5.3, about 4.1 to about 5.2, about 4.1 to about 5.1, about 4.1 to about 5.0, about 4.1 to about 4.9, about 4.1 to about 4.8, about 4.1 to about 4.7, about 4.1 to about 4.6, about 4.1 to about 4.5, about 4.1 to about 4.4, about 4.1 to about 4.3, about 4.1 to about 4.2, about 4.2 to about 6.5, about 4.2 to about 6.4, about 4.2 to about 6.3, about 4.2 to about 6.2, about 4.2 to about 6.1, about 4.2 to about 6.0, about 4.2 to about 5.9, about 4.2 to about 5.8, about 4.2 to about 5.7, about 4.2 to about 5.6, about 4.2 to about 5.5, about 4.2 to about 5.4, about 4.2 to about 5.3, about 4.2 to about 5.2, about 4.2 to about 5.1, about 4.2 to about 5.0, about 4.2 to about 4.9, about 4.2 to about 4.8, about 4.2 to about 4.7, about 4.2 to about 4.6, about 4.2 to about 4.5, about 4.2 to about 4.4, about 4.2 to about 4.3, about 4.3 to about 6.5, about 4.3 to about 6.4, about 4.3 to about 6.3, about 4.3 to about 6.2, about 4.3 to about 6.1, about 4.3 to about 6.0, about 4.3 to about 5.9, about 4.3 to about 5.8, about 4.3 to about 5.7, about 4.3 to about 5.6, about 4.3 to about 5.5, about 4.3 to about 5.4, about 4.3 to about 5.3, about 4.3 to about 5.2, about 4.3 to about 5.1, about 4.3 to about 5.0, about 4.3 to about 4.9, about 4.3 to about 4.8, about 4.3 to about 4.7, about 4.3 to about 4.6, about 4.3 to about 4.5, about 4.3 to about 4.4, about 4.4 to about 6.5, about 4.4 to about 6.4, about 4.4 to about 6.3, about 4.4 to about 6.2, about 4.4 to about 6.1, about 4.4 to about 6.0, about 4.4 to about 5.9, about 4.4 to about 5.8, about 4.4 to about 5.7, about 4.4 to about 5.6, about 4.4 to about 5.5, about 4.4 to about 5.4, about 4.4 to about 5.3, about 4.4 to about 5.2, about 4.4 to about 5.1, about 4.4 to about 5.0, about 4.4 to about 4.9, about 4.4 to about 4.8, about 4.4 to about 4.7, about 4.4 to about 4.6, about 4.4 to about 4.5, about 4.5 to about 6.5, about 4.5 to about 6.4, about 4.5 to about 6.3, about 4.5 to about 6.2, about 4.5 to about 6.1, about 4.5 to about 6.0, about 4.5 to about 5.9, about 4.5 to about 5.8, about 4.5 to about 5.7, about 4.5 to about 5.6, about 4.5 to about 5.5, about 4.5 to about 5.4, about 4.5 to about 5.3, about 4.5 to about 5.2, about 4.5 to about 5.1, about 4.5 to about 5.0, about 4.5 to about 4.9, about 4.5 to about 4.8, about 4.5 to about 4.7, about 4.5 to about 4.6, about 4.6 to about 6.5, about 4.6 to about 6.4, about 4.6 to about 6.3, about 4.6 to about 6.2, about 4.6 to about 6.1, about 4.6 to about 6.0, about 4.6 to about 5.9, about 4.6 to about 5.8, about 4.6 to about 5.7, about 4.6 to about 5.6, about 4.6 to about 5.5, about 4.6 to about 5.4, about 4.6 to about 5.3, about 4.6 to about 5.2, about 4.6 to about 5.1, about 4.6 to about 5.0, about 4.6 to about 4.9, about 4.6 to about 4.8, about 4.6 to about 4.7, about 4.7 to about 6.5, about 4.7 to about 6.4, about 4.7 to about 6.3, about 4.7 to about 6.2, about 4.7 to about 6.1, about 4.7 to about 6.0, about 4.7 to about 5.9, about 4.7 to about 5.8, about 4.7 to about 5.7, about 4.7 to about 5.6, about 4.7 to about 5.5, about 4.7 to about 5.4, about 4.7 to about 5.3, about 4.7 to about 5.2, about 4.7 to about 5.1, about 4.7 to about 5.0, about 4.7 to about 4.9, about 4.7 to about 4.8, about 4.8 to about 6.5, about 4.8 to about 6.4, about 4.8 to about 6.3, about 4.8 to about 6.2, about 4.8 to about 6.1, about 4.8 to about 6.0, about 4.8 to about 5.9, about 4.8 to about 5.8, about 4.8 to about 5.7, about 4.8 to about 5.6, about 4.8 to about 5.5, about 4.8 to about 5.4, about 4.8 to about 5.3, about 4.8 to about 5.2, about 4.8 to about 5.1, about 4.8 to about 5.0, about 4.8 to about 4.9, about 4.9 to about 6.5, about 4.9 to about 6.4, about 4.9 to about 6.3, about 4.9 to about 6.2, about 4.9 to about 6.1, about 4.9 to about 6.0, about 4.9 to about 5.9, about 4.9 to about 5.8, about 4.9 to about 5.7, about 4.9 to about 5.6, about 4.9 to about 5.5, about 4.9 to about 5.4, about 4.9 to about 5.3, about 4.9 to about 5.2, about 4.9 to about 5.1, about 4.9 to about 5.0, about 5.0 to about 6.5, about 5.0 to about 6.4, about 5.0 to about 6.3, about 5.0 to about 6.2, about 5.0 to about 6.1, about 5.0 to about 6.0, about 5.0 to about 5.9, about 5.0 to about 5.8, about 5.0 to about 5.7, about 5.0 to about 5.6, about 5.0 to about 5.5, about 5.0 to about 5.4, about 5.0 to about 5.3, about 5.0 to about 5.2, about 5.0 to about 5.1, about 5.1 to about 6.5, about 5.1 to about 6.4, about 5.1 to about 6.3, about 5.1 to about 6.2, about 5.1 to about 6.1, about 5.1 to about 6.0, about 5.1 to about 5.9, about 5.1 to about 5.8, about 5.1 to about 5.7, about 5.1 to about 5.6, about 5.1 to about 5.5, about 5.1 to about 5.4, about 5.1 to about 5.3, about 5.1 to about 5.2, about 5.2 to about 6.5, about 5.2 to about 6.4, about 5.2 to about 6.3, about 5.2 to about 6.2, about 5.2 to about 6.1, about 5.2 to about 6.0, about 5.2 to about 5.9, about 5.2 to about 5.8, about 5.2 to about 5.7, about 5.2 to about 5.6, about 5.2 to about 5.5, about 5.2 to about 5.4, about 5.2 to about 5.3, about 5.3 to about 6.5, about 5.3 to about 6.4, about 5.3 to about 6.3, about 5.3 to about 6.2, about 5.3 to about 6.1, about 5.3 to about 6.0, about 5.3 to about 5.9, about 5.3 to about 5.8, about 5.3 to about 5.7, about 5.3 to about 5.6, about 5.3 to about 5.5, about 5.3 to about 5.4, about 5.4 to about 6.5, about 5.4 to about 6.4, about 5.4 to about 6.3, about 5.4 to about 6.2, about 5.4 to about 6.1, about 5.4 to about 6.0, about 5.4 to about 5.9, about 5.4 to about 5.8, about 5.4 to about 5.7, about 5.4 to about 5.6, about 5.4 to about 5.5, about 5.5 to about 6.5, about 5.5 to about 6.4, about 5.5 to about 6.3, about 5.5 to about 6.2, about 5.5 to about 6.1, about 5.5 to about 6.0, about 5.5 to about 5.9, about 5.5 to about 5.8, about 5.5 to about 5.7, about 5.5 to about 5.6, about 5.6 to about 6.5, about 5.6 to about 6.4, about 5.6 to about 6.3, about 5.6 to about 6.2, about 5.6 to about 6.1, about 5.6 to about 6.0, about 5.6 to about 5.9, about 5.6 to about 5.8, about 5.6 to about 5.7, about 5.7 to about 6.5, about 5.7 to about 6.4, about 5.7 to about 6.3, about 5.7 to about 6.2, about 5.7 to about 6.1, about 5.7 to about 6.0, about 5.7 to about 5.9, about 5.7 to about 5.8, about 5.8 to about 6.5, about 5.8 to about 6.4, about 5.8 to about 6.3, about 5.8 to about 6.2, about 5.8 to about 6.1, about 5.8 to about 6.0, about 5.8 to about 5.9, about 5.9 to about 6.5, about 5.9 to about 6.4, about 5.9 to about 6.3, about 5.9 to about 6.2, about 5.9 to about 6.1, about 5.9 to about 6.0, about 6.0 to about 6.5, about 6.0 to about 6.4, about 6.0 to about 6.3, about 6.0 to about 6.2, about 6.0 to about 6.1, about 6.1 to about 6.5, about 6.1 to about 6.4, about 6.1 to about 6.3, about 6.1 to about 6.2, about 6.2 to about 6.5, about 6.2 to about 6.4, about 6.2 to about 6.3, about 6.3 to about 6.5, about 6.3 to about 6.4, or about 6.4 to about 6.5) is faster (e.g., (e.g., at least 5% faster, at least 10% faster, at least 15% faster, at least 20%, at least 25% faster, at least 30% faster, at least 35% faster, at least 40% faster, at least 45% faster, at least 50% faster, at least 55% faster, at least 60% faster, at least 65% faster, at least 70% faster, at least 75% faster, at least 80% faster, at least 85% faster, at least 90% faster, at least 95% faster, at least 100% faster, at least 120% faster, at least 140% faster, at least 160% faster, at least 180% faster, at least 200% faster, at least 220% faster at least 240% faster at least 260% faster at least 280% faster at least 300% faster at least 320% faster at least 340% faster at least 360% faster at least 380% faster at least 400% faster at least 420% faster at least 440% faster at least 460% faster at least 480% faster, at least 500% faster, at least 1,000% faster, at least 2,000% faster, at least 3,000% faster, at least 4,000% faster, at least 5,000%, at least 6,000% faster, at least 7,000% faster, at least 8,000% faster, at least 9,000% faster, or at least 10,000% faster, or about 5% faster to about 10,000% faster, about 5% faster to about 9,000% faster, about 5% faster to about 8,000% faster, about 5% faster to about 7,000% faster, about 5% faster to about 6,000% faster, about 5% faster to about 5,000% faster, about 5% faster to about 4,000% faster, about 5% faster to about 3,000% faster, about 5% faster to about 2,000% faster, about 5% faster to about 1,000% faster, about 5% faster to about 500% faster, about 5% faster to about 480% faster, about 5% faster to about 460% faster, about 5% faster to about 440% faster, about 5% faster to about 420% faster, about 5% faster to about 400% faster, about 5% faster to about 380% faster, about 5% faster to about 360% faster, about 5% faster to about 340% faster, about 5% faster to about 320% faster, about 5% faster to about 300% faster, about 5% faster to about 280% faster, about 5% faster to about 260% faster, about 5% faster to about 240% faster, about 5% faster to about 220% faster, about 5% faster to about 200% faster, about 5% faster to about 180% faster, about 5% faster to about 160% faster, about 5% faster to about 140% faster, about 5% faster to about 120% faster, about 5% faster to about 100% faster, about 5% faster to about 95% faster, about 5% faster to about 90% faster, about 5% faster to about 85% faster, about 5% faster to about 80% faster, about 5% faster to about 75% faster, about 5% faster to about 70% faster, about 5% faster to about 65% faster, about 5% faster to about 60% faster, about 5% faster to about 55% faster, about 5% faster to about 50% faster, about 5% faster to about 45% faster, about 5% faster to about 40% faster, about 5% faster to about 35% faster, about 5% faster to about 30% faster, about 5% faster to about 25% faster, about 5% faster to about 20% faster, about 5% faster to about 15% faster, about 5% faster to about 10% faster, about 10% faster to about 10,000% faster, about 10% faster to about 9,000% faster, about 10% faster to about 8,000% faster, about 10% faster to about 7,000% faster, about 10% faster to about 6,000% faster, about 10% faster to about 5,000% faster, about 10% faster to about 4,000% faster, about 10% faster to about 3,000% faster, about 10% faster to about 2,000% faster, about 10% faster to about 1,000% faster, about 10% faster to about 500% faster, about 10% faster to about 480% faster, about 10% faster to about 460% faster, about 10% faster to about 440% faster, about 10% faster to about 420% faster, about 10% faster to about 400% faster, about 10% faster to about 380% faster, about 10% faster to about 360% faster, about 10% faster to about 340% faster, about 10% faster to about 320% faster, about 10% faster to about 300% faster, about 10% faster to about 280% faster, about 10% faster to about 260% faster, about 10% faster to about 240% faster, about 10% faster to about 220% faster, about 10% faster to about 200% faster, about 10% faster to about 180% faster, about 10% faster to about 160% faster, about 10% faster to about 140% faster, about 10% faster to about 120% faster, about 10% faster to about 100% faster, about 10% faster to about 95% faster, about 10% faster to about 90% faster, about 10% faster to about 85% faster, about 10% faster to about 80% faster, about 10% faster to about 75% faster, about 10% faster to about 70% faster, about 10% faster to about 65% faster, about 10% faster to about 60% faster, about 10% faster to about 55% faster, about 10% faster to about 50% faster, about 10% faster to about 45% faster, about 10% faster to about 40% faster, about 10% faster to about 35% faster, about 10% faster to about 30% faster, about 10% faster to about 25% faster, about 10% faster to about 20% faster, about 10% faster to about 15% faster, about 15% faster to about 10,000% faster, about 15% faster to about 9,000% faster, about 15% faster to about 8,000% faster, about 15% faster to about 7,000% faster, about 15% faster to about 6,000% faster, about 15% faster to about 5,000% faster, about 15% faster to about 4,000% faster, about 15% faster to about 3,000% faster, about 15% faster to about 2,000% faster, about 15% faster to about 1,000% faster, about 15% faster to about 500% faster, about 15% faster to about 480% faster, about 15% faster to about 460% faster, about 15% faster to about 440% faster, about 15% faster to about 420% faster, about 15% faster to about 400% faster, about 15% faster to about 380% faster, about 15% faster to about 360% faster, about 15% faster to about 340% faster, about 15% faster to about 320% faster, about 15% faster to about 300% faster, about 15% faster to about 280% faster, about 15% faster to about 260% faster, about 15% faster to about 240% faster, about 15% faster to about 220% faster, about 15% faster to about 200% faster, about 15% faster to about 180% faster, about 15% faster to about 160% faster, about 15% faster to about 140% faster, about 15% faster to about 120% faster, about 15% faster to about 100% faster, about 15% faster to about 95% faster, about 15% faster to about 90% faster, about 15% faster to about 85% faster, about 15% faster to about 80% faster, about 15% faster to about 75% faster, about 15% faster to about 70% faster, about 15% faster to about 65% faster, about 15% faster to about 60% faster, about 15% faster to about 55% faster, about 15% faster to about 50% faster, about 15% faster to about 45% faster, about 15% faster to about 40% faster, about 15% faster to about 35% faster, about 15% faster to about 30% faster, about 15% faster to about 25% faster, about 15% faster to about 20% faster, about 20% faster to about 10,000% faster, about 20% faster to about 9,000% faster, about 20% faster to about 8,000% faster, about 20% faster to about 7,000% faster, about 20% faster to about 6,000% faster, about 20% faster to about 5,000% faster, about 20% faster to about 4,000% faster, about 20% faster to about 3,000% faster, about 20% faster to about 2,000% faster, about 20% faster to about 1,000% faster, about 20% faster to about 500% faster, about 20% faster to about 480% faster, about 20% faster to about 460% faster, about 20% faster to about 440% faster, about 20% faster to about 420% faster, about 20% faster to about 400% faster, about 20% faster to about 380% faster, about 20% faster to about 360% faster, about 20% faster to about 340% faster, about 20% faster to about 320% faster, about 20% faster to about 300% faster, about 20% faster to about 280% faster, about 20% faster to about 260% faster, about 20% faster to about 240% faster, about 20% faster to about 220% faster, about 20% faster to about 200% faster, about 20% faster to about 180% faster, about 20% faster to about 160% faster, about 20% faster to about 140% faster, about 20% faster to about 120% faster, about 20% faster to about 100% faster, about 20% faster to about 95% faster, about 20% faster to about 90% faster, about 20% faster to about 85% faster, about 20% faster to about 80% faster, about 20% faster to about 75% faster, about 20% faster to about 70% faster, about 20% faster to about 65% faster, about 20% faster to about 60% faster, about 20% faster to about 55% faster, about 20% faster to about 50% faster, about 20% faster to about 45% faster, about 20% faster to about 40% faster, about 20% faster to about 35% faster, about 20% faster to about 30% faster, about 20% faster to about 25% faster, about 25% faster to about 10,000% faster, about 25% faster to about 9,000% faster, about 25% faster to about 8,000% faster, about 25% faster to about 7,000% faster, about 25% faster to about 6,000% faster, about 25% faster to about 5,000% faster, about 25% faster to about 4,000% faster, about 25% faster to about 3,000% faster, about 25% faster to about 2,000% faster, about 25% faster to about 1,000% faster, about 25% faster to about 500% faster, about 25% faster to about 480% faster, about 25% faster to about 460% faster, about 25% faster to about 440% faster, about 25% faster to about 420% faster, about 25% faster to about 400% faster, about 25% faster to about 380% faster, about 25% faster to about 360% faster, about 25% faster to about 340% faster, about 25% faster to about 320% faster, about 25% faster to about 300% faster, about 25% faster to about 280% faster, about 25% faster to about 260% faster, about 25% faster to about 240% faster, about 25% faster to about 220% faster, about 25% faster to about 200% faster, about 25% faster to about 180% faster, about 25% faster to about 160% faster, about 25% faster to about 140% faster, about 25% faster to about 120% faster, about 25% faster to about 100% faster, about 25% faster to about 95% faster, about 25% faster to about 90% faster, about 25% faster to about 85% faster, about 25% faster to about 80% faster, about 25% faster to about 75% faster, about 25% faster to about 70% faster, about 25% faster to about 65% faster, about 25% faster to about 60% faster, about 25% faster to about 55% faster, about 25% faster to about 50% faster, about 25% faster to about 45% faster, about 25% faster to about 40% faster, about 25% faster to about 35% faster, about 25% faster to about 30% faster, about 30% faster to about 10,000% faster, about 30% faster to about 9,000% faster, about 30% faster to about 8,000% faster, about 30% faster to about 7,000% faster, about 30% faster to about 6,000% faster, about 30% faster to about 5,000% faster, about 30% faster to about 4,000% faster, about 30% faster to about 3,000% faster, about 30% faster to about 2,000% faster, about 30% faster to about 1,000% faster, about 30% faster to about 500% faster, about 30% faster to about 480% faster, about 30% faster to about 460% faster, about 30% faster to about 440% faster, about 30% faster to about 420% faster, about 30% faster to about 400% faster, about 30% faster to about 380% faster, about 30% faster to about 360% faster, about 30% faster to about 340% faster, about 30% faster to about 320% faster, about 30% faster to about 300% faster, about 30% faster to about 280% faster, about 30% faster to about 260% faster, about 30% faster to about 240% faster, about 30% faster to about 220% faster, about 30% faster to about 200% faster, about 30% faster to about 180% faster, about 30% faster to about 160% faster, about 30% faster to about 140% faster, about 30% faster to about 120% faster, about 30% faster to about 100% faster, about 30% faster to about 95% faster, about 30% faster to about 90% faster, about 30% faster to about 85% faster, about 30% faster to about 80% faster, about 30% faster to about 75% faster, about 30% faster to about 70% faster, about 30% faster to about 65% faster, about 30% faster to about 60% faster, about 30% faster to about 55% faster, about 30% faster to about 50% faster, about 30% faster to about 45% faster, about 30% faster to about 40% faster, about 30% faster to about 35% faster, about 35% faster to about 10,000% faster, about 35% faster to about 9,000% faster, about 35% faster to about 8,000% faster, about 35% faster to about 7,000% faster, about 35% faster to about 6,000% faster, about 35% faster to about 5,000% faster, about 35% faster to about 4,000% faster, about 35% faster to about 3,000% faster, about 35% faster to about 2,000% faster, about 35% faster to about 1,000% faster, about 35% faster to about 500% faster, about 35% faster to about 480% faster, about 35% faster to about 460% faster, about 35% faster to about 440% faster, about 35% faster to about 420% faster, about 35% faster to about 400% faster, about 35% faster to about 380% faster, about 35% faster to about 360% faster, about 35% faster to about 340% faster, about 35% faster to about 320% faster, about 35% faster to about 300% faster, about 35% faster to about 280% faster, about 35% faster to about 260% faster, about 35% faster to about 240% faster, about 35% faster to about 220% faster, about 35% faster to about 200% faster, about 35% faster to about 180% faster, about 35% faster to about 160% faster, about 35% faster to about 140% faster, about 35% faster to about 120% faster, about 35% faster to about 100% faster, about 35% faster to about 95% faster, about 35% faster to about 90% faster, about 35% faster to about 85% faster, about 35% faster to about 80% faster, about 35% faster to about 75% faster, about 35% faster to about 70% faster, about 35% faster to about 65% faster, about 35% faster to about 60% faster, about 35% faster to about 55% faster, about 35% faster to about 50% faster, about 35% faster to about 45% faster, about 35% faster to about 40% faster, about 40% faster to about 10,000% faster, about 40% faster to about 9,000% faster, about 40% faster to about 8,000% faster, about 40% faster to about 7,000% faster, about 40% faster to about 6,000% faster, about 40% faster to about 5,000% faster, about 40% faster to about 4,000% faster, about 40% faster to about 3,000% faster, about 40% faster to about 2,000% faster, about 40% faster to about 1,000% faster, about 40% faster to about 500% faster, about 40% faster to about 480% faster, about 40% faster to about 460% faster, about 40% faster to about 440% faster, about 40% faster to about 420% faster, about 40% faster to about 400% faster, about 40% faster to about 380% faster, about 40% faster to about 360% faster, about 40% faster to about 340% faster, about 40% faster to about 320% faster, about 40% faster to about 300% faster, about 40% faster to about 280% faster, about 40% faster to about 260% faster, about 40% faster to about 240% faster, about 40% faster to about 220% faster, about 40% faster to about 200% faster, about 40% faster to about 180% faster, about 40% faster to about 160% faster, about 40% faster to about 140% faster, about 40% faster to about 120% faster, about 40% faster to about 100% faster, about 40% faster to about 95% faster, about 40% faster to about 90% faster, about 40% faster to about 85% faster, about 40% faster to about 80% faster, about 40% faster to about 75% faster, about 40% faster to about 70% faster, about 40% faster to about 65% faster, about 40% faster to about 60% faster, about 40% faster to about 55% faster, about 40% faster to about 50% faster, about 40% faster to about 45% faster, about 45% faster to about 10,000% faster, about 45% faster to about 9,000% faster, about 45% faster to about 8,000% faster, about 45% faster to about 7,000% faster, about 45% faster to about 6,000% faster, about 45% faster to about 5,000% faster, about 45% faster to about 4,000% faster, about 45% faster to about 3,000% faster, about 45% faster to about 2,000% faster, about 45% faster to about 1,000% faster, about 45% faster to about 500% faster, about 45% faster to about 480% faster, about 45% faster to about 460% faster, about 45% faster to about 440% faster, about 45% faster to about 420% faster, about 45% faster to about 400% faster, about 45% faster to about 380% faster, about 45% faster to about 360% faster, about 45% faster to about 340% faster, about 45% faster to about 320% faster, about 45% faster to about 300% faster, about 45% faster to about 280% faster, about 45% faster to about 260% faster, about 45% faster to about 240% faster, about 45% faster to about 220% faster, about 45% faster to about 200% faster, about 45% faster to about 180% faster, about 45% faster to about 160% faster, about 45% faster to about 140% faster, about 45% faster to about 120% faster, about 45% faster to about 100% faster, about 45% faster to about 95% faster, about 45% faster to about 90% faster, about 45% faster to about 85% faster, about 45% faster to about 80% faster, about 45% faster to about 75% faster, about 45% faster to about 70% faster, about 45% faster to about 65% faster, about 45% faster to about 60% faster, about 45% faster to about 55% faster, about 45% faster to about 50% faster, about 50% faster to about 10,000% faster, about 50% faster to about 9,000% faster, about 50% faster to about 8,000% faster, about 50% faster to about 7,000% faster, about 50% faster to about 6,000% faster, about 50% faster to about 5,000% faster, about 50% faster to about 4,000% faster, about 50% faster to about 3,000% faster, about 50% faster to about 2,000% faster, about 50% faster to about 1,000% faster, about 50% faster to about 500% faster, about 50% faster to about 480% faster, about 50% faster to about 460% faster, about 50% faster to about 440% faster, about 50% faster to about 420% faster, about 50% faster to about 400% faster, about 50% faster to about 380% faster, about 50% faster to about 360% faster, about 50% faster to about 340% faster, about 50% faster to about 320% faster, about 50% faster to about 300% faster, about 50% faster to about 280% faster, about 50% faster to about 260% faster, about 50% faster to about 240% faster, about 50% faster to about 220% faster, about 50% faster to about 200% faster, about 50% faster to about 180% faster, about 50% faster to about 160% faster, about 50% faster to about 140% faster, about 50% faster to about 120% faster, about 50% faster to about 100% faster, about 50% faster to about 95% faster, about 50% faster to about 90% faster, about 50% faster to about 85% faster, about 50% faster to about 80% faster, about 50% faster to about 75% faster, about 50% faster to about 70% faster, about 50% faster to about 65% faster, about 50% faster to about 60% faster, about 50% faster to about 55% faster, about 55% faster to about 10,000% faster, about 55% faster to about 9,000% faster, about 55% faster to about 8,000% faster, about 55% faster to about 7,000% faster, about 55% faster to about 6,000% faster, about 55% faster to about 5,000% faster, about 55% faster to about 4,000% faster, about 55% faster to about 3,000% faster, about 55% faster to about 2,000% faster, about 55% faster to about 1,000% faster, about 55% faster to about 500% faster, about 55% faster to about 480% faster, about 55% faster to about 460% faster, about 55% faster to about 440% faster, about 55% faster to about 420% faster, about 55% faster to about 400% faster, about 55% faster to about 380% faster, about 55% faster to about 360% faster, about 55% faster to about 340% faster, about 55% faster to about 320% faster, about 55% faster to about 300% faster, about 55% faster to about 280% faster, about 55% faster to about 260% faster, about 55% faster to about 240% faster, about 55% faster to about 220% faster, about 55% faster to about 200% faster, about 55% faster to about 180% faster, about 55% faster to about 160% faster, about 55% faster to about 140% faster, about 55% faster to about 120% faster, about 55% faster to about 100% faster, about 55% faster to about 95% faster, about 55% faster to about 90% faster, about 55% faster to about 85% faster, about 55% faster to about 80% faster, about 55% faster to about 75% faster, about 55% faster to about 70% faster, about 55% faster to about 65% faster, about 55% faster to about 60% faster, about 60% faster to about 10,000% faster, about 60% faster to about 9,000% faster, about 60% faster to about 8,000% faster, about 60% faster to about 7,000% faster, about 60% faster to about 6,000% faster, about 60% faster to about 5,000% faster, about 60% faster to about 4,000% faster, about 60% faster to about 3,000% faster, about 60% faster to about 2,000% faster, about 60% faster to about 1,000% faster, about 60% faster to about 500% faster, about 60% faster to about 480% faster, about 60% faster to about 460% faster, about 60% faster to about 440% faster, about 60% faster to about 420% faster, about 60% faster to about 400% faster, about 60% faster to about 380% faster, about 60% faster to about 360% faster, about 60% faster to about 340% faster, about 60% faster to about 320% faster, about 60% faster to about 300% faster, about 60% faster to about 280% faster, about 60% faster to about 260% faster, about 60% faster to about 240% faster, about 60% faster to about 220% faster, about 60% faster to about 200% faster, about 60% faster to about 180% faster, about 60% faster to about 160% faster, about 60% faster to about 140% faster, about 60% faster to about 120% faster, about 60% faster to about 100% faster, about 60% faster to about 95% faster, about 60% faster to about 90% faster, about 60% faster to about 85% faster, about 60% faster to about 80% faster, about 60% faster to about 75% faster, about 60% faster to about 70% faster, about 60% faster to about 65% faster, about 65% faster to about 10,000% faster, about 65% faster to about 9,000% faster, about 65% faster to about 8,000% faster, about 65% faster to about 7,000% faster, about 65% faster to about 6,000% faster, about 65% faster to about 5,000% faster, about 65% faster to about 4,000% faster, about 65% faster to about 3,000% faster, about 65% faster to about 2,000% faster, about 65% faster to about 1,000% faster, about 65% faster to about 500% faster, about 65% faster to about 480% faster, about 65% faster to about 460% faster, about 65% faster to about 440% faster, about 65% faster to about 420% faster, about 65% faster to about 400% faster, about 65% faster to about 380% faster, about 65% faster to about 360% faster, about 65% faster to about 340% faster, about 65% faster to about 320% faster, about 65% faster to about 300% faster, about 65% faster to about 280% faster, about 65% faster to about 260% faster, about 65% faster to about 240% faster, about 65% faster to about 220% faster, about 65% faster to about 200% faster, about 65% faster to about 180% faster, about 65% faster to about 160% faster, about 65% faster to about 140% faster, about 65% faster to about 120% faster, about 65% faster to about 100% faster, about 65% faster to about 95% faster, about 65% faster to about 90% faster, about 65% faster to about 85% faster, about 65% faster to about 80% faster, about 65% faster to about 75% faster, about 65% faster to about 70% faster, about 70% faster to about 10,000% faster, about 70% faster to about 9,000% faster, about 70% faster to about 8,000% faster, about 70% faster to about 7,000% faster, about 70% faster to about 6,000% faster, about 70% faster to about 5,000% faster, about 70% faster to about 4,000% faster, about 70% faster to about 3,000% faster, about 70% faster to about 2,000% faster, about 70% faster to about 1,000% faster, about 70% faster to about 500% faster, about 70% faster to about 480% faster, about 70% faster to about 460% faster, about 70% faster to about 440% faster, about 70% faster to about 420% faster, about 70% faster to about 400% faster, about 70% faster to about 380% faster, about 70% faster to about 360% faster, about 70% faster to about 340% faster, about 70% faster to about 320% faster, about 70% faster to about 300% faster, about 70% faster to about 280% faster, about 70% faster to about 260% faster, about 70% faster to about 240% faster, about 70% faster to about 220% faster, about 70% faster to about 200% faster, about 70% faster to about 180% faster, about 70% faster to about 160% faster, about 70% faster to about 140% faster, about 70% faster to about 120% faster, about 70% faster to about 100% faster, about 70% faster to about 95% faster, about 70% faster to about 90% faster, about 70% faster to about 85% faster, about 70% faster to about 80% faster, about 70% faster to about 75% faster, about 75% faster to about 10,000% faster, about 75% faster to about 9,000% faster, about 75% faster to about 8,000% faster, about 75% faster to about 7,000% faster, about 75% faster to about 6,000% faster, about 75% faster to about 5,000% faster, about 75% faster to about 4,000% faster, about 75% faster to about 3,000% faster, about 75% faster to about 2,000% faster, about 75% faster to about 1,000% faster, about 75% faster to about 500% faster, about 75% faster to about 480% faster, about 75% faster to about 460% faster, about 75% faster to about 440% faster, about 75% faster to about 420% faster, about 75% faster to about 400% faster, about 75% faster to about 380% faster, about 75% faster to about 360% faster, about 75% faster to about 340% faster, about 75% faster to about 320% faster, about 75% faster to about 300% faster, about 75% faster to about 280% faster, about 75% faster to about 260% faster, about 75% faster to about 240% faster, about 75% faster to about 220% faster, about 75% faster to about 200% faster, about 75% faster to about 180% faster, about 75% faster to about 160% faster, about 75% faster to about 140% faster, about 75% faster to about 120% faster, about 75% faster to about 100% faster, about 75% faster to about 95% faster, about 75% faster to about 90% faster, about 75% faster to about 85% faster, about 75% faster to about 80% faster, about 80% faster to about 10,000% faster, about 80% faster to about 9,000% faster, about 80% faster to about 8,000% faster, about 80% faster to about 7,000% faster, about 80% faster to about 6,000% faster, about 80% faster to about 5,000% faster, about 80% faster to about 4,000% faster, about 80% faster to about 3,000% faster, about 80% faster to about 2,000% faster, about 80% faster to about 1,000% faster, about 80% faster to about 500% faster, about 80% faster to about 480% faster, about 80% faster to about 460% faster, about 80% faster to about 440% faster, about 80% faster to about 420% faster, about 80% faster to about 400% faster, about 80% faster to about 380% faster, about 80% faster to about 360% faster, about 80% faster to about 340% faster, about 80% faster to about 320% faster, about 80% faster to about 300% faster, about 80% faster to about 280% faster, about 80% faster to about 260% faster, about 80% faster to about 240% faster, about 80% faster to about 220% faster, about 80% faster to about 200% faster, about 80% faster to about 180% faster, about 80% faster to about 160% faster, about 80% faster to about 140% faster, about 80% faster to about 120% faster, about 80% faster to about 100% faster, about 80% faster to about 95% faster, about 80% faster to about 90% faster, about 80% faster to about 85% faster, about 85% faster to about 10,000% faster, about 85% faster to about 9,000% faster, about 85% faster to about 8,000% faster, about 85% faster to about 7,000% faster, about 85% faster to about 6,000% faster, about 85% faster to about 5,000% faster, about 85% faster to about 4,000% faster, about 85% faster to about 3,000% faster, about 85% faster to about 2,000% faster, about 85% faster to about 1,000% faster, about 85% faster to about 500% faster, about 85% faster to about 480% faster, about 85% faster to about 460% faster, about 85% faster to about 440% faster, about 85% faster to about 420% faster, about 85% faster to about 400% faster, about 85% faster to about 380% faster, about 85% faster to about 360% faster, about 85% faster to about 340% faster, about 85% faster to about 320% faster, about 85% faster to about 300% faster, about 85% faster to about 280% faster, about 85% faster to about 260% faster, about 85% faster to about 240% faster, about 85% faster to about 220% faster, about 85% faster to about 200% faster, about 85% faster to about 180% faster, about 85% faster to about 160% faster, about 85% faster to about 140% faster, about 85% faster to about 120% faster, about 85% faster to about 100% faster, about 85% faster to about 95% faster, about 85% faster to about 90% faster, about 90% faster to about 10,000% faster, about 90% faster to about 9,000% faster, about 90% faster to about 8,000% faster, about 90% faster to about 7,000% faster, about 90% faster to about 6,000% faster, about 90% faster to about 5,000% faster, about 90% faster to about 4,000% faster, about 90% faster to about 3,000% faster, about 90% faster to about 2,000% faster, about 90% faster to about 1,000% faster, about 90% faster to about 500% faster, about 90% faster to about 480% faster, about 90% faster to about 460% faster, about 90% faster to about 440% faster, about 90% faster to about 420% faster, about 90% faster to about 400% faster, about 90% faster to about 380% faster, about 90% faster to about 360% faster, about 90% faster to about 340% faster, about 90% faster to about 320% faster, about 90% faster to about 300% faster, about 90% faster to about 280% faster, about 90% faster to about 260% faster, about 90% faster to about 240% faster, about 90% faster to about 220% faster, about 90% faster to about 200% faster, about 90% faster to about 180% faster, about 90% faster to about 160% faster, about 90% faster to about 140% faster, about 90% faster to about 120% faster, about 90% faster to about 100% faster, about 90% faster to about 95% faster, about 95% faster to about 10,000% faster, about 95% faster to about 9,000% faster, about 95% faster to about 8,000% faster, about 95% faster to about 7,000% faster, about 95% faster to about 6,000% faster, about 95% faster to about 5,000% faster, about 95% faster to about 4,000% faster, about 95% faster to about 3,000% faster, about 95% faster to about 2,000% faster, about 95% faster to about 1,000% faster, about 95% faster to about 500% faster, about 95% faster to about 480% faster, about 95% faster to about 460% faster, about 95% faster to about 440% faster, about 95% faster to about 420% faster, about 95% faster to about 400% faster, about 95% faster to about 380% faster, about 95% faster to about 360% faster, about 95% faster to about 340% faster, about 95% faster to about 320% faster, about 95% faster to about 300% faster, about 95% faster to about 280% faster, about 95% faster to about 260% faster, about 95% faster to about 240% faster, about 95% faster to about 220% faster, about 95% faster to about 200% faster, about 95% faster to about 180% faster, about 95% faster to about 160% faster, about 95% faster to about 140% faster, about 95% faster to about 120% faster, about 95% faster to about 100% faster, about 100% faster to about 10,000% faster, about 100% faster to about 9,000% faster, about 100% faster to about 8,000% faster, about 100% faster to about 7,000% faster, about 100% faster to about 6,000% faster, about 100% faster to about 5,000% faster, about 100% faster to about 4,000% faster, about 100% faster to about 3,000% faster, about 100% faster to about 2,000% faster, about 100% faster to about 1,000% faster, about 100% faster to about 500% faster, about 100% faster to about 480% faster, about 100% faster to about 460% faster, about 100% faster to about 440% faster, about 100% faster to about 420% faster, about 100% faster to about 400% faster, about 100% faster to about 380% faster, about 100% faster to about 360% faster, about 100% faster to about 340% faster, about 100% faster to about 320% faster, about 100% faster to about 300% faster, about 100% faster to about 280% faster, about 100% faster to about 260% faster, about 100% faster to about 240% faster, about 100% faster to about 220% faster, about 100% faster to about 200% faster, about 100% faster to about 180% faster, about 100% faster to about 160% faster, about 100% faster to about 140% faster, about 100% faster to about 120% faster, about 120% faster to about 10,000% faster, about 120% faster to about 9,000% faster, about 120% faster to about 8,000% faster, about 120% faster to about 7,000% faster, about 120% faster to about 6,000% faster, about 120% faster to about 5,000% faster, about 120% faster to about 4,000% faster, about 120% faster to about 3,000% faster, about 120% faster to about 2,000% faster, about 120% faster to about 1,000% faster, about 120% faster to about 500% faster, about 120% faster to about 480% faster, about 120% faster to about 460% faster, about 120% faster to about 440% faster, about 120% faster to about 420% faster, about 120% faster to about 400% faster, about 120% faster to about 380% faster, about 120% faster to about 360% faster, about 120% faster to about 340% faster, about 120% faster to about 320% faster, about 120% faster to about 300% faster, about 120% faster to about 280% faster, about 120% faster to about 260% faster, about 120% faster to about 240% faster, about 120% faster to about 220% faster, about 120% faster to about 200% faster, about 120% faster to about 180% faster, about 120% faster to about 160% faster, about 120% faster to about 140% faster, about 140% faster to about 10,000% faster, about 140% faster to about 9,000% faster, about 140% faster to about 8,000% faster, about 140% faster to about 7,000% faster, about 140% faster to about 6,000% faster, about 140% faster to about 5,000% faster, about 140% faster to about 4,000% faster, about 140% faster to about 3,000% faster, about 140% faster to about 2,000% faster, about 140% faster to about 1,000% faster, about 140% faster to about 500% faster, about 140% faster to about 480% faster, about 140% faster to about 460% faster, about 140% faster to about 440% faster, about 140% faster to about 420% faster, about 140% faster to about 400% faster, about 140% faster to about 380% faster, about 140% faster to about 360% faster, about 140% faster to about 340% faster, about 140% faster to about 320% faster, about 140% faster to about 300% faster, about 140% faster to about 280% faster, about 140% faster to about 260% faster, about 140% faster to about 240% faster, about 140% faster to about 220% faster, about 140% faster to about 200% faster, about 140% faster to about 180% faster, about 140% faster to about 160% faster, about 160% faster to about 10,000% faster, about 160% faster to about 9,000% faster, about 160% faster to about 8,000% faster, about 160% faster to about 7,000% faster, about 160% faster to about 6,000% faster, about 160% faster to about 5,000% faster, about 160% faster to about 4,000% faster, about 160% faster to about 3,000% faster, about 160% faster to about 2,000% faster, about 160% faster to about 1,000% faster, about 160% faster to about 500% faster, about 160% faster to about 480% faster, about 160% faster to about 460% faster, about 160% faster to about 440% faster, about 160% faster to about 420% faster, about 160% faster to about 400% faster, about 160% faster to about 380% faster, about 160% faster to about 360% faster, about 160% faster to about 340% faster, about 160% faster to about 320% faster, about 160% faster to about 300% faster, about 160% faster to about 280% faster, about 160% faster to about 260% faster, about 160% faster to about 240% faster, about 160% faster to about 220% faster, about 160% faster to about 200% faster, about 160% faster to about 180% faster, about 180% faster to about 10,000% faster, about 180% faster to about 9,000% faster, about 180% faster to about 8,000% faster, about 180% faster to about 7,000% faster, about 180% faster to about 6,000% faster, about 180% faster to about 5,000% faster, about 180% faster to about 4,000% faster, about 180% faster to about 3,000% faster, about 180% faster to about 2,000% faster, about 180% faster to about 1,000% faster, about 180% faster to about 500% faster, about 180% faster to about 480% faster, about 180% faster to about 460% faster, about 180% faster to about 440% faster, about 180% faster to about 420% faster, about 180% faster to about 400% faster, about 180% faster to about 380% faster, about 180% faster to about 360% faster, about 180% faster to about 340% faster, about 180% faster to about 320% faster, about 180% faster to about 300% faster, about 180% faster to about 280% faster, about 180% faster to about 260% faster, about 180% faster to about 240% faster, about 180% faster to about 220% faster, about 180% faster to about 200% faster, about 200% faster to about 10,000% faster, about 200% faster to about 9,000% faster, about 200% faster to about 8,000% faster, about 200% faster to about 7,000% faster, about 200% faster to about 6,000% faster, about 200% faster to about 5,000% faster, about 200% faster to about 4,000% faster, about 200% faster to about 3,000% faster, about 200% faster to about 2,000% faster, about 200% faster to about 1,000% faster, about 200% faster to about 500% faster, about 200% faster to about 480% faster, about 200% faster to about 460% faster, about 200% faster to about 440% faster, about 200% faster to about 420% faster, about 200% faster to about 400% faster, about 200% faster to about 380% faster, about 200% faster to about 360% faster, about 200% faster to about 340% faster, about 200% faster to about 320% faster, about 200% faster to about 300% faster, about 200% faster to about 280% faster, about 200% faster to about 260% faster, about 200% faster to about 240% faster, about 200% faster to about 220% faster, about 220% faster to about 10,000% faster, about 220% faster to about 9,000% faster, about 220% faster to about 8,000% faster, about 220% faster to about 7,000% faster, about 220% faster to about 6,000% faster, about 220% faster to about 5,000% faster, about 220% faster to about 4,000% faster, about 220% faster to about 3,000% faster, about 220% faster to about 2,000% faster, about 220% faster to about 1,000% faster, about 220% faster to about 500% faster, about 220% faster to about 480% faster, about 220% faster to about 460% faster, about 220% faster to about 440% faster, about 220% faster to about 420% faster, about 220% faster to about 400% faster, about 220% faster to about 380% faster, about 220% faster to about 360% faster, about 220% faster to about 340% faster, about 220% faster to about 320% faster, about 220% faster to about 300% faster, about 220% faster to about 280% faster, about 220% faster to about 260% faster, about 220% faster to about 240% faster, about 240% faster to about 10,000% faster, about 240% faster to about 9,000% faster, about 240% faster to about 8,000% faster, about 240% faster to about 7,000% faster, about 240% faster to about 6,000% faster, about 240% faster to about 5,000% faster, about 240% faster to about 4,000% faster, about 240% faster to about 3,000% faster, about 240% faster to about 2,000% faster, about 240% faster to about 1,000% faster, about 240% faster to about 500% faster, about 240% faster to about 480% faster, about 240% faster to about 460% faster, about 240% faster to about 440% faster, about 240% faster to about 420% faster, about 240% faster to about 400% faster, about 240% faster to about 380% faster, about 240% faster to about 360% faster, about 240% faster to about 340% faster, about 240% faster to about 320% faster, about 240% faster to about 300% faster, about 240% faster to about 280% faster, about 240% faster to about 260% faster, about 260% faster to about 10,000% faster, about 260% faster to about 9,000% faster, about 260% faster to about 8,000% faster, about 260% faster to about 7,000% faster, about 260% faster to about 6,000% faster, about 260% faster to about 5,000% faster, about 260% faster to about 4,000% faster, about 260% faster to about 3,000% faster, about 260% faster to about 2,000% faster, about 260% faster to about 1,000% faster, about 260% faster to about 500% faster, about 260% faster to about 480% faster, about 260% faster to about 460% faster, about 260% faster to about 440% faster, about 260% faster to about 420% faster, about 260% faster to about 400% faster, about 260% faster to about 380% faster, about 260% faster to about 360% faster, about 260% faster to about 340% faster, about 260% faster to about 320% faster, about 260% faster to about 300% faster, about 260% faster to about 280% faster, about 280% faster to about 10,000% faster, about 280% faster to about 9,000% faster, about 280% faster to about 8,000% faster, about 280% faster to about 7,000% faster, about 280% faster to about 6,000% faster, about 280% faster to about 5,000% faster, about 280% faster to about 4,000% faster, about 280% faster to about 3,000% faster, about 280% faster to about 2,000% faster, about 280% faster to about 1,000% faster, about 280% faster to about 500% faster, about 280% faster to about 480% faster, about 280% faster to about 460% faster, about 280% faster to about 440% faster, about 280% faster to about 420% faster, about 280% faster to about 400% faster, about 280% faster to about 380% faster, about 280% faster to about 360% faster, about 280% faster to about 340% faster, about 280% faster to about 320% faster, about 280% faster to about 300% faster, about 300% faster to about 10,000% faster, about 300% faster to about 9,000% faster, about 300% faster to about 8,000% faster, about 300% faster to about 7,000% faster, about 300% faster to about 6,000% faster, about 300% faster to about 5,000% faster, about 300% faster to about 4,000% faster, about 300% faster to about 3,000% faster, about 300% faster to about 2,000% faster, about 300% faster to about 1,000% faster, about 300% faster to about 500% faster, about 300% faster to about 480% faster, about 300% faster to about 460% faster, about 300% faster to about 440% faster, about 300% faster to about 420% faster, about 300% faster to about 400% faster, about 300% faster to about 380% faster, about 300% faster to about 360% faster, about 300% faster to about 340% faster, about 300% faster to about 320% faster, about 320% faster to about 10,000% faster, about 320% faster to about 9,000% faster, about 320% faster to about 8,000% faster, about 320% faster to about 7,000% faster, about 320% faster to about 6,000% faster, about 320% faster to about 5,000% faster, about 320% faster to about 4,000% faster, about 320% faster to about 3,000% faster, about 320% faster to about 2,000% faster, about 320% faster to about 1,000% faster, about 320% faster to about 500% faster, about 320% faster to about 480% faster, about 320% faster to about 460% faster, about 320% faster to about 440% faster, about 320% faster to about 420% faster, about 320% faster to about 400% faster, about 320% faster to about 380% faster, about 320% faster to about 360% faster, about 320% faster to about 340% faster, about 340% faster to about 10,000% faster, about 340% faster to about 9,000% faster, about 340% faster to about 8,000% faster, about 340% faster to about 7,000% faster, about 340% faster to about 6,000% faster, about 340% faster to about 5,000% faster, about 340% faster to about 4,000% faster, about 340% faster to about 3,000% faster, about 340% faster to about 2,000% faster, about 340% faster to about 1,000% faster, about 340% faster to about 500% faster, about 340% faster to about 480% faster, about 340% faster to about 460% faster, about 340% faster to about 440% faster, about 340% faster to about 420% faster, about 340% faster to about 400% faster, about 340% faster to about 380% faster, about 340% faster to about 360% faster, about 360% faster to about 10,000% faster, about 360% faster to about 9,000% faster, about 360% faster to about 8,000% faster, about 360% faster to about 7,000% faster, about 360% faster to about 6,000% faster, about 360% faster to about 5,000% faster, about 360% faster to about 4,000% faster, about 360% faster to about 3,000% faster, about 360% faster to about 2,000% faster, about 360% faster to about 1,000% faster, about 360% faster to about 500% faster, about 360% faster to about 480% faster, about 360% faster to about 460% faster, about 360% faster to about 440% faster, about 360% faster to about 420% faster, about 360% faster to about 400% faster, about 360% faster to about 380% faster, about 380% faster to about 10,000% faster, about 380% faster to about 9,000% faster, about 380% faster to about 8,000% faster, about 380% faster to about 7,000% faster, about 380% faster to about 6,000% faster, about 380% faster to about 5,000% faster, about 380% faster to about 4,000% faster, about 380% faster to about 3,000% faster, about 380% faster to about 2,000% faster, about 380% faster to about 1,000% faster, about 380% faster to about 500% faster, about 380% faster to about 480% faster, about 380% faster to about 460% faster, about 380% faster to about 440% faster, about 380% faster to about 420% faster, about 380% faster to about 400% faster, about 400% faster to about 10,000% faster, about 400% faster to about 9,000% faster, about 400% faster to about 8,000% faster, about 400% faster to about 7,000% faster, about 400% faster to about 6,000% faster, about 400% faster to about 5,000% faster, about 400% faster to about 4,000% faster, about 400% faster to about 3,000% faster, about 400% faster to about 2,000% faster, about 400% faster to about 1,000% faster, about 400% faster to about 500% faster, about 400% faster to about 480% faster, about 400% faster to about 460% faster, about 400% faster to about 440% faster, about 400% faster to about 420% faster, about 420% faster to about 10,000% faster, about 420% faster to about 9,000% faster, about 420% faster to about 8,000% faster, about 420% faster to about 7,000% faster, about 420% faster to about 6,000% faster, about 420% faster to about 5,000% faster, about 420% faster to about 4,000% faster, about 420% faster to about 3,000% faster, about 420% faster to about 2,000% faster, about 420% faster to about 1,000% faster, about 420% faster to about 500% faster, about 420% faster to about 480% faster, about 420% faster to about 460% faster, about 420% faster to about 440% faster, about 440% faster to about 10,000% faster, about 440% faster to about 9,000% faster, about 440% faster to about 8,000% faster, about 440% faster to about 7,000% faster, about 440% faster to about 6,000% faster, about 440% faster to about 5,000% faster, about 440% faster to about 4,000% faster, about 440% faster to about 3,000% faster, about 440% faster to about 2,000% faster, about 440% faster to about 1,000% faster, about 440% faster to about 500% faster, about 440% faster to about 480% faster, about 440% faster to about 460% faster, about 460% faster to about 10,000% faster, about 460% faster to about 9,000% faster, about 460% faster to about 8,000% faster, about 460% faster to about 7,000% faster, about 460% faster to about 6,000% faster, about 460% faster to about 5,000% faster, about 460% faster to about 4,000% faster, about 460% faster to about 3,000% faster, about 460% faster to about 2,000% faster, about 460% faster to about 1,000% faster, about 460% faster to about 500% faster, about 460% faster to about 480% faster, about 480% faster to about 10,000% faster, about 480% faster to about 9,000% faster, about 480% faster to about 8,000% faster, about 480% faster to about 7,000% faster, about 480% faster to about 6,000% faster, about 480% faster to about 5,000% faster, about 480% faster to about 4,000% faster, about 480% faster to about 3,000% faster, about 480% faster to about 2,000% faster, about 480% faster to about 1,000% faster, about 480% faster to about 500% faster, about 500% faster to about 10,000% faster, about 500% faster to about 9,000% faster, about 500% faster to about 8,000% faster, about 500% faster to about 7,000% faster, about 500% faster to about 6,000% faster, about 500% faster to about 5,000% faster, about 500% faster to about 4,000% faster, about 500% faster to about 3,000% faster, about 500% faster to about 2,000% faster, about 500% faster to about 1,000% faster, about 1,000% faster to about 10,000% faster, about 1,000% faster to about 9,000% faster, about 1,000% faster to about 8,000% faster, about 1,000% faster to about 7,000% faster, about 1,000% faster to about 6,000% faster, about 1,000% faster to about 5,000% faster, about 1,000% faster to about 4,000% faster, about 1,000% faster to about 3,000% faster, about 1,000% faster to about 2,000% faster, about 2,000% faster to about 10,000% faster, about 2,000% faster to about 9,000% faster, about 2,000% faster to about 8,000% faster, about 2,000% faster to about 7,000% faster, about 2,000% faster to about 6,000% faster, about 2,000% faster to about 5,000% faster, about 2,000% faster to about 4,000% faster, about 2,000% faster to about 3,000% faster, about 3,000% faster to about 10,000% faster, about 3,000% faster to about 9,000% faster, about 3,000% faster to about 8,000% faster, about 3,000% faster to about 7,000% faster, about 3,000% faster to about 6,000% faster, about 3,000% faster to about 5,000% faster, about 3,000% faster to about 4,000% faster, about 4,000% faster to about 10,000% faster, about 4,000% faster to about 9,000% faster, about 4,000% faster to about 8,000% faster, about 4,000% faster to about 7,000% faster, about 4,000% faster to about 6,000% faster, about 4,000% faster to about 5,000% faster, about 5,000% faster to about 10,000% faster, about 5,000% faster to about 9,000% faster, about 5,000% faster to about 8,000% faster, about 5,000% faster to about 7,000% faster, about 5,000% faster to about 6,000% faster, about 6,000% faster to about 10,000% faster, about 6,000% faster to about 9,000% faster, about 6,000% faster to about 8,000% faster, about 6,000% faster to about 7,000% faster, about 7,000% faster to about 10,000% faster, about 7,000% faster to about 9,000% faster, about 7,000% faster to about 8,000% faster, about 8,000% faster to about 10,000% faster, about 8,000% faster to about 9,000% faster, or about 9,000% faster to about 10,000% faster) than the dissociation rate at a pH of about 7.0 to about 8.0 (e.g., about 7.0 to about 7.9, about 7.0 to about 7.8, about 7.0 to about 7.7, about 7.0 to about 7.6, about 7.0 to about 7.5, about 7.0 to about 7.4, about 7.0 to about 7.3, about 7.0 to about 7.2, about 7.0 to about 7.1, about 7.1 to about 8.0, about 7.1 to about 7.9, about 7.1 to about 7.8, about 7.1 to about 7.7, about 7.1 to about 7.6, about 7.1 to about 7.5, about 7.1 to about 7.4, about 7.1 to about 7.3, about 7.1 to about 7.2, about 7.2 to about 8.0, about 7.2 to about 7.9, about 7.2 to about 7.8, about 7.2 to about 7.7, about 7.2 to about 7.6, about 7.2 to about 7.5, about 7.2 to about 7.4, about 7.2 to about 7.3, about 7.3 to about 8.0, about 7.3 to about 7.9, about 7.3 to about 7.8, about 7.3 to about 7.7, about 7.3 to about 7.6, about 7.3 to about 7.5, about 7.3 to about 7.4, about 7.4 to about 8.0, about 7.4 to about 7.9, about 7.4 to about 7.8, about 7.4 to about 7.7, about 7.4 to about 7.6, about 7.4 to about 7.5, about 7.5 to about 8.0, about 7.5 to about 7.9, about 7.5 to about 7.8, about 7.5 to about 7.7, about 7.5 to about 7.6, about 7.6 to about 8.0, about 7.6 to about 7.9, about 7.6 to about 7.8, about 7.6 to about 7.7, about 7.7 to about 8.0, about 7.7 to about 7.9, about 7.7 to about 7.8, about 7.8 to about 8.0, about 7.8 to about 7.9, or about 7.9 to about 8.0).

[0667] In some embodiments of any of the antigen-binding protein constructs (ABPCs) described herein, the dissociation constant (K_{D}) of the first antigen-binding domain (and optionally the second antigen-binding domain, if present) at a pH of about 4.0 to about 6.5 (e.g., any of the subranges of this range described herein) is greater (e.g., detectably greater) (e.g., at least 5% greater, at least 10% greater, at least 15% greater, at least 20% greater, at least 25% greater, at least 30% greater, at least 35% greater, at least 40% greater, at least 45% greater, at least 50% greater, at least 55% greater, at least 60% greater, at least 65% greater, at least 70% greater, at least 80% greater, at least 85% greater, at least 90% greater, at least 95% greater, at least 100% greater, at least 120% greater, at least 140% greater, at least 160% greater, at least 180% greater, at least 200% greater, at least 220% greater, at least 240% greater, at least 260% greater, at least 280% greater, at least 300% greater, at least 320% greater, at least 340% greater, at least 360% greater, at least 380% greater, at least 400% greater, at least 420% greater, at least 440% greater, at least 460% greater, at least 480% greater, at least 500% greater, at least 1,000% greater, at least 2,000% greater, at least 3,000% greater, at least 4,000% greater, at least 5,000% greater, at least 6,000% greater, at least 7,000% greater, at least 8,000% greater, at least 9,000% greater, or at least 10,000% greater, or about 5% greater to about 10,000% greater, about 5% greater to about 9,000% greater, about 5% greater to about 8,000% greater, about 5% greater to about 7,000% greater, about 5% greater to about 6,000% greater, about 5% greater to about 5,000% greater, about 5% greater to about 4,000% greater, about 5% greater to about 3,000% greater, about 5% greater to about 2,000% greater, about 5% greater to about 1,000% greater, about 5% greater to about 500% greater, about 5% greater to about 480% greater, about 5% greater to about 460% greater, about 5% greater to about 440% greater, about 5% greater to about 420% greater, about 5% greater to about 400% greater, about 5% greater to about 380% greater, about 5% greater to about 360% greater, about 5% greater to about 340% greater, about 5% greater to about 320% greater, about 5% greater to about 300% greater, about 5% greater to about 280% greater, about 5% greater to about 260% greater, about 5% greater to about 240% greater, about 5% greater to about 220% greater, about 5% greater to about 200% greater, about 5% greater to about 180% greater, about 5% greater to about 160% greater, about 5% greater to about 140% greater, about 5% greater to about 120% greater, about 5% greater to about 100% greater, about 5% greater to about 95% greater, about 5% greater to about 90% greater, about 5% greater to about 85% greater, about 5% greater to about 80% greater, about 5% greater to about 75% greater, about 5% greater to about 70% greater, about 5% greater to about 65% greater, about 5% greater to about 60% greater, about 5% greater to about 55% greater, about 5% greater to about 50% greater, about 5% greater to about 45% greater, about 5% greater to about 40% greater, about 5% greater to about 35% greater, about 5% greater to about 30% greater, about 5% greater to about 25% greater, about 5% greater to about 20% greater, about 5% greater to about 15% greater, about 5% greater to about 10% greater, about 10% greater to about 10,000% greater, about 10% greater to about 9,000% greater, about 10% greater to about 8,000% greater, about 10% greater to about 7,000% greater, about 10% greater to about 6,000% greater, about 10% greater to about 5,000% greater, about 10% greater to about 4,000% greater, about 10% greater to about 3,000% greater, about 10% greater to about 2,000% greater, about 10% greater to about 1,000% greater, about 10% greater to about 500% greater, about 10% greater to about 480% greater, about 10% greater to about 460% greater, about 10% greater to about 440% greater, about 10% greater to about 420% greater, about 10% greater to about 400% greater, about 10% greater to about 380% greater, about 10% greater to about 360% greater, about 10% greater to about 340% greater, about 10% greater to about 320% greater, about 10% greater to about 300% greater, about 10% greater to about 280% greater, about 10% greater to about 260% greater, about 10% greater to about 240% greater, about 10% greater to about 220% greater, about 10% greater to about 200% greater, about 10% greater to about 180% greater, about 10% greater to about 160% greater, about 10% greater to about 140% greater, about 10% greater to about 120% greater, about 10% greater to about 100% greater, about 10% greater to about 95% greater, about 10% greater to about 90% greater, about 10% greater to about 85% greater, about 10% greater to about 80% greater, about 10% greater to about 75% greater, about 10% greater to about 70% greater, about 10% greater to about 65% greater, about 10% greater to about 60% greater, about 10% greater to about 55% greater, about 10% greater to about 50% greater, about 10% greater to about 45% greater, about 10% greater to about 40% greater, about 10% greater to about 35% greater, about 10% greater to about 30% greater, about 10% greater to about 25% greater, about 10% greater to about 20% greater, about 10% greater to about 15% greater, about 15% greater to about 10,000% greater, about 15% greater to about 9,000% greater, about 15% greater to about 8,000% greater, about 15% greater to about 7,000% greater, about 15% greater to about 6,000% greater, about 15% greater to about 5,000% greater, about 15% greater to about 4,000% greater, about 15% greater to about 3,000% greater, about 15% greater to about 2,000% greater, about 15% greater to about 1,000% greater, about 15% greater to about 500% greater, about 15% greater to about 480% greater, about 15% greater to about 460% greater, about 15% greater to about 440% greater, about 15% greater to about 420% greater, about 15% greater to about 400% greater, about 15% greater to about 380% greater, about 15% greater to about 360% greater, about 15% greater to about 340% greater, about 15% greater to about 320% greater, about 15% greater to about 300% greater, about 15% greater to about 280% greater, about 15% greater to about 260% greater, about 15% greater to about 240% greater, about 15% greater to about 220% greater, about 15% greater to about 200% greater, about 15% greater to about 180% greater, about 15% greater to about 160% greater, about 15% greater to about 140% greater, about 15% greater to about 120% greater, about 15% greater to about 100% greater, about 15% greater to about 95% greater, about 15% greater to about 90% greater, about 15% greater to about 85% greater, about 15% greater to about 80% greater, about 15% greater to about 75% greater, about 15% greater to about 70% greater, about 15% greater to about 65% greater, about 15% greater to about 60% greater, about 15% greater to about 55% greater, about 15% greater to about 50% greater, about 15% greater to about 45% greater, about 15% greater to about 40% greater, about 15% greater to about 35% greater, about 15% greater to about 30% greater, about 15% greater to about 25% greater, about 15% greater to about 20% greater, about 20% greater to about 10,000% greater, about 20% greater to about 9,000% greater, about 20% greater to about 8,000% greater, about 20% greater to about 7,000% greater, about 20% greater to about 6,000% greater, about 20% greater to about 5,000% greater, about 20% greater to about 4,000% greater, about 20% greater to about 3,000% greater, about 20% greater to about 2,000% greater, about 20% greater to about 1,000% greater, about 20% greater to about 500% greater, about 20% greater to about 480% greater, about 20% greater to about 460% greater, about 20% greater to about 440% greater, about 20% greater to about 420% greater, about 20% greater to about 400% greater, about 20% greater to about 380% greater, about 20% greater to about 360% greater, about 20% greater to about 340% greater, about 20% greater to about 320% greater, about 20% greater to about 300% greater, about 20% greater to about 280% greater, about 20% greater to about 260% greater, about 20% greater to about 240% greater, about 20% greater to about 220% greater, about 20% greater to about 200% greater, about 20% greater to about 180% greater, about 20% greater to about 160% greater, about 20% greater to about 140% greater, about 20% greater to about 120% greater, about 20% greater to about 100% greater, about 20% greater to about 95% greater, about 20% greater to about 90% greater, about 20% greater to about 85% greater, about 20% greater to about 80% greater, about 20% greater to about 75% greater, about 20% greater to about 70% greater, about 20% greater to about 65% greater, about 20% greater to about 60% greater, about 20% greater to about 55% greater, about 20% greater to about 50% greater, about 20% greater to about 45% greater, about 20% greater to about 40% greater, about 20% greater to about 35% greater, about 20% greater to about 30% greater, about 20% greater to about 25% greater, about 25% greater to about 10,000% greater, about 25% greater to about 9,000% greater, about 25% greater to about 8,000% greater, about 25% greater to about 7,000% greater, about 25% greater to about 6,000% greater, about 25% greater to about 5,000% greater, about 25% greater to about 4,000% greater, about 25% greater to about 3,000% greater, about 25% greater to about 2,000% greater, about 25% greater to about 1,000% greater, about 25% greater to about 500% greater, about 25% greater to about 480% greater, about 25% greater to about 460% greater, about 25% greater to about 440% greater, about 25% greater to about 420% greater, about 25% greater to about 400% greater, about 25% greater to about 380% greater, about 25% greater to about 360% greater, about 25% greater to about 340% greater, about 25% greater to about 320% greater, about 25% greater to about 300% greater, about 25% greater to about 280% greater, about 25% greater to about 260% greater, about 25% greater to about 240% greater, about 25% greater to about 220% greater, about 25% greater to about 200% greater, about 25% greater to about 180% greater, about 25% greater to about 160% greater, about 25% greater to about 140% greater, about 25% greater to about 120% greater, about 25% greater to about 100% greater, about 25% greater to about 95% greater, about 25% greater to about 90% greater, about 25% greater to about 85% greater, about 25% greater to about 80% greater, about 25% greater to about 75% greater, about 25% greater to about 70% greater, about 25% greater to about 65% greater, about 25% greater to about 60% greater, about 25% greater to about 55% greater, about 25% greater to about 50% greater, about 25% greater to about 45% greater, about 25% greater to about 40% greater, about 25% greater to about 35% greater, about 25% greater to about 30% greater, about 30% greater to about 10,000% greater, about 30% greater to about 9,000% greater, about 30% greater to about 8,000% greater, about 30% greater to about 7,000% greater, about 30% greater to about 6,000% greater, about 30% greater to about 5,000% greater, about 30% greater to about 4,000% greater, about 30% greater to about 3,000% greater, about 30% greater to about 2,000% greater, about 30% greater to about 1,000% greater, about 30% greater to about 500% greater, about 30% greater to about 480% greater, about 30% greater to about 460% greater, about 30% greater to about 440% greater, about 30% greater to about 420% greater, about 30% greater to about 400% greater, about 30% greater to about 380% greater, about 30% greater to about 360% greater, about 30% greater to about 340% greater, about 30% greater to about 320% greater, about 30% greater to about 300% greater, about 30% greater to about 280% greater, about 30% greater to about 260% greater, about 30% greater to about 240% greater, about 30% greater to about 220% greater, about 30% greater to about 200% greater, about 30% greater to about 180% greater, about 30% greater to about 160% greater, about 30% greater to about 140% greater, about 30% greater to about 120% greater, about 30% greater to about 100% greater, about 30% greater to about 95% greater, about 30% greater to about 90% greater, about 30% greater to about 85% greater, about 30% greater to about 80% greater, about 30% greater to about 75% greater, about 30% greater to about 70% greater, about 30% greater to about 65% greater, about 30% greater to about 60% greater, about 30% greater to about 55% greater, about 30% greater to about 50% greater, about 30% greater to about 45% greater, about 30% greater to about 40% greater, about 30% greater to about 35% greater, about 35% greater to about 10,000% greater, about 35% greater to about 9,000% greater, about 35% greater to about 8,000% greater, about 35% greater to about 7,000% greater, about 35% greater to about 6,000% greater, about 35% greater to about 5,000% greater, about 35% greater to about 4,000% greater, about 35% greater to about 3,000% greater, about 35% greater to about 2,000% greater, about 35% greater to about 1,000% greater, about 35% greater to about 500% greater, about 35% greater to about 480% greater, about 35% greater to about 460% greater, about 35% greater to about 440% greater, about 35% greater to about 420% greater, about 35% greater to about 400% greater, about 35% greater to about 380% greater, about 35% greater to about 360% greater, about 35% greater to about 340% greater, about 35% greater to about 320% greater, about 35% greater to about 300% greater, about 35% greater to about 280% greater, about 35% greater to about 260% greater, about 35% greater to about 240% greater, about 35% greater to about 220% greater, about 35% greater to about 200% greater, about 35% greater to about 180% greater, about 35% greater to about 160% greater, about 35% greater to about 140% greater, about 35% greater to about 120% greater, about 35% greater to about 100% greater, about 35% greater to about 95% greater, about 35% greater to about 90% greater, about 35% greater to about 85% greater, about 35% greater to about 80% greater, about 35% greater to about 75% greater, about 35% greater to about 70% greater, about 35% greater to about 65% greater, about 35% greater to about 60% greater, about 35% greater to about 55% greater, about 35% greater to about 50% greater, about 35% greater to about 45% greater, about 35% greater to about 40% greater, about 40% greater to about 10,000% greater, about 40% greater to about 9,000% greater, about 40% greater to about 8,000% greater, about 40% greater to about 7,000% greater, about 40% greater to about 6,000% greater, about 40% greater to about 5,000% greater, about 40% greater to about 4,000% greater, about 40% greater to about 3,000% greater, about 40% greater to about 2,000% greater, about 40% greater to about 1,000% greater, about 40% greater to about 500% greater, about 40% greater to about 480% greater, about 40% greater to about 460% greater, about 40% greater to about 440% greater, about 40% greater to about 420% greater, about 40% greater to about 400% greater, about 40% greater to about 380% greater, about 40% greater to about 360% greater, about 40% greater to about 340% greater, about 40% greater to about 320% greater, about 40% greater to about 300% greater, about 40% greater to about 280% greater, about 40% greater to about 260% greater, about 40% greater to about 240% greater, about 40% greater to about 220% greater, about 40% greater to about 200% greater, about 40% greater to about 180% greater, about 40% greater to about 160% greater, about 40% greater to about 140% greater, about 40% greater to about 120% greater, about 40% greater to about 100% greater, about 40% greater to about 95% greater, about 40% greater to about 90% greater, about 40% greater to about 85% greater, about 40% greater to about 80% greater, about 40% greater to about 75% greater, about 40% greater to about 70% greater, about 40% greater to about 65% greater, about 40% greater to about 60% greater, about 40% greater to about 55% greater, about 40% greater to about 50% greater, about 40% greater to about 45% greater, about 45% greater to about 10,000% greater, about 45% greater to about 9,000% greater, about 45% greater to about 8,000% greater, about 45% greater to about 7,000% greater, about 45% greater to about 6,000% greater, about 45% greater to about 5,000% greater, about 45% greater to about 4,000% greater, about 45% greater to about 3,000% greater, about 45% greater to about 2,000% greater, about 45% greater to about 1,000% greater, about 45% greater to about 500% greater, about 45% greater to about 480% greater, about 45% greater to about 460% greater, about 45% greater to about 440% greater, about 45% greater to about 420% greater, about 45% greater to about 400% greater, about 45% greater to about 380% greater, about 45% greater to about 360% greater, about 45% greater to about 340% greater, about 45% greater to about 320% greater, about 45% greater to about 300% greater, about 45% greater to about 280% greater, about 45% greater to about 260% greater, about 45% greater to about 240% greater, about 45% greater to about 220% greater, about 45% greater to about 200% greater, about 45% greater to about 180% greater, about 45% greater to about 160% greater, about 45% greater to about 140% greater, about 45% greater to about 120% greater, about 45% greater to about 100% greater, about 45% greater to about 95% greater, about 45% greater to about 90% greater, about 45% greater to about 85% greater, about 45% greater to about 80% greater, about 45% greater to about 75% greater, about 45% greater to about 70% greater, about 45% greater to about 65% greater, about 45% greater to about 60% greater, about 45% greater to about 55% greater, about 45% greater to about 50% greater, about 50% greater to about 10,000% greater, about 50% greater to about 9,000% greater, about 50% greater to about 8,000% greater, about 50% greater to about 7,000% greater, about 50% greater to about 6,000% greater, about 50% greater to about 5,000% greater, about 50% greater to about 4,000% greater, about 50% greater to about 3,000% greater, about 50% greater to about 2,000% greater, about 50% greater to about 1,000% greater, about 50% greater to about 500% greater, about 50% greater to about 480% greater, about 50% greater to about 460% greater, about 50% greater to about 440% greater, about 50% greater to about 420% greater, about 50% greater to about 400% greater, about 50% greater to about 380% greater, about 50% greater to about 360% greater, about 50% greater to about 340% greater, about 50% greater to about 320% greater, about 50% greater to about 300% greater, about 50% greater to about 280% greater, about 50% greater to about 260% greater, about 50% greater to about 240% greater, about 50% greater to about 220% greater, about 50% greater to about 200% greater, about 50% greater to about 180% greater, about 50% greater to about 160% greater, about 50% greater to about 140% greater, about 50% greater to about 120% greater, about 50% greater to about 100% greater, about 50% greater to about 95% greater, about 50% greater to about 90% greater, about 50% greater to about 85% greater, about 50% greater to about 80% greater, about 50% greater to about 75% greater, about 50% greater to about 70% greater, about 50% greater to about 65% greater, about 50% greater to about 60% greater, about 50% greater to about 55% greater, about 55% greater to about 10,000% greater, about 55% greater to about 9,000% greater, about 55% greater to about 8,000% greater, about 55% greater to about 7,000% greater, about 55% greater to about 6,000% greater, about 55% greater to about 5,000% greater, about 55% greater to about 4,000% greater, about 55% greater to about 3,000% greater, about 55% greater to about 2,000% greater, about 55% greater to about 1,000% greater, about 55% greater to about 500% greater, about 55% greater to about 480% greater, about 55% greater to about 460% greater, about 55% greater to about 440% greater, about 55% greater to about 420% greater, about 55% greater to about 400% greater, about 55% greater to about 380% greater, about 55% greater to about 360% greater, about 55% greater to about 340% greater, about 55% greater to about 320% greater, about 55% greater to about 300% greater, about 55% greater to about 280% greater, about 55% greater to about 260% greater, about 55% greater to about 240% greater, about 55% greater to about 220% greater, about 55% greater to about 200% greater, about 55% greater to about 180% greater, about 55% greater to about 160% greater, about 55% greater to about 140% greater, about 55% greater to about 120% greater, about 55% greater to about 100% greater, about 55% greater to about 95% greater, about 55% greater to about 90% greater, about 55% greater to about 85% greater, about 55% greater to about 80% greater, about 55% greater to about 75% greater, about 55% greater to about 70% greater, about 55% greater to about 65% greater, about 55% greater to about 60% greater, about 60% greater to about 10,000% greater, about 60% greater to about 9,000% greater, about 60% greater to about 8,000% greater, about 60% greater to about 7,000% greater, about 60% greater to about 6,000% greater, about 60% greater to about 5,000% greater, about 60% greater to about 4,000% greater, about 60% greater to about 3,000% greater, about 60% greater to about 2,000% greater, about 60% greater to about 1,000% greater, about 60% greater to about 500% greater, about 60% greater to about 480% greater, about 60% greater to about 460% greater, about 60% greater to about 440% greater, about 60% greater to about 420% greater, about 60% greater to about 400% greater, about 60% greater to about 380% greater, about 60% greater to about 360% greater, about 60% greater to about 340% greater, about 60% greater to about 320% greater, about 60% greater to about 300% greater, about 60% greater to about 280% greater, about 60% greater to about 260% greater, about 60% greater to about 240% greater, about 60% greater to about 220% greater, about 60% greater to about 200% greater, about 60% greater to about 180% greater, about 60% greater to about 160% greater, about 60% greater to about 140% greater, about 60% greater to about 120% greater, about 60% greater to about 100% greater, about 60% greater to about 95% greater, about 60% greater to about 90% greater, about 60% greater to about 85% greater, about 60% greater to about 80% greater, about 60% greater to about 75% greater, about 60% greater to about 70% greater, about 60% greater to about 65% greater, about 65% greater to about 10,000% greater, about 65% greater to about 9,000% greater, about 65% greater to about 8,000% greater, about 65% greater to about 7,000% greater, about 65% greater to about 6,000% greater, about 65% greater to about 5,000% greater, about 65% greater to about 4,000% greater, about 65% greater to about 3,000% greater, about 65% greater to about 2,000% greater, about 65% greater to about 1,000% greater, about 65% greater to about 500% greater, about 65% greater to about 480% greater, about 65% greater to about 460% greater, about 65% greater to about 440% greater, about 65% greater to about 420% greater, about 65% greater to about 400% greater, about 65% greater to about 380% greater, about 65% greater to about 360% greater, about 65% greater to about 340% greater, about 65% greater to about 320% greater, about 65% greater to about 300% greater, about 65% greater to about 280% greater, about 65% greater to about 260% greater, about 65% greater to about 240% greater, about 65% greater to about 220% greater, about 65% greater to about 200% greater, about 65% greater to about 180% greater, about 65% greater to about 160% greater, about 65% greater to about 140% greater, about 65% greater to about 120% greater, about 65% greater to about 100% greater, about 65% greater to about 95% greater, about 65% greater to about 90% greater, about 65% greater to about 85% greater, about 65% greater to about 80% greater, about 65% greater to about 75% greater, about 65% greater to about 70% greater, about 70% greater to about 10,000% greater, about 70% greater to about 9,000% greater, about 70% greater to about 8,000% greater, about 70% greater to about 7,000% greater, about 70% greater to about 6,000% greater, about 70% greater to about 5,000% greater, about 70% greater to about 4,000% greater, about 70% greater to about 3,000% greater, about 70% greater to about 2,000% greater, about 70% greater to about 1,000% greater, about 70% greater to about 500% greater, about 70% greater to about 480% greater, about 70% greater to about 460% greater, about 70% greater to about 440% greater, about 70% greater to about 420% greater, about 70% greater to about 400% greater, about 70% greater to about 380% greater, about 70% greater to about 360% greater, about 70% greater to about 340% greater, about 70% greater to about 320% greater, about 70% greater to about 300% greater, about 70% greater to about 280% greater, about 70% greater to about 260% greater, about 70% greater to about 240% greater, about 70% greater to about 220% greater, about 70% greater to about 200% greater, about 70% greater to about 180% greater, about 70% greater to about 160% greater, about 70% greater to about 140% greater, about 70% greater to about 120% greater, about 70% greater to about 100% greater, about 70% greater to about 95% greater, about 70% greater to about 90% greater, about 70% greater to about 85% greater, about 70% greater to about 80% greater, about 70% greater to about 75% greater, about 75% greater to about 10,000% greater, about 75% greater to about 9,000% greater, about 75% greater to about 8,000% greater, about 75% greater to about 7,000% greater, about 75% greater to about 6,000% greater, about 75% greater to about 5,000% greater, about 75% greater to about 4,000% greater, about 75% greater to about 3,000% greater, about 75% greater to about 2,000% greater, about 75% greater to about 1,000% greater, about 75% greater to about 500% greater, about 75% greater to about 480% greater, about 75% greater to about 460% greater, about 75% greater to about 440% greater, about 75% greater to about 420% greater, about 75% greater to about 400% greater, about 75% greater to about 380% greater, about 75% greater to about 360% greater, about 75% greater to about 340% greater, about 75% greater to about 320% greater, about 75% greater to about 300% greater, about 75% greater to about 280% greater, about 75% greater to about 260% greater, about 75% greater to about 240% greater, about 75% greater to about 220% greater, about 75% greater to about 200% greater, about 75% greater to about 180% greater, about 75% greater to about 160% greater, about 75% greater to about 140% greater, about 75% greater to about 120% greater, about 75% greater to about 100% greater, about 75% greater to about 95% greater, about 75% greater to about 90% greater, about 75% greater to about 85% greater, about 75% greater to about 80% greater, about 80% greater to about 10,000% greater, about 80% greater to about 9,000% greater, about 80% greater to about 8,000% greater, about 80% greater to about 7,000% greater, about 80% greater to about 6,000% greater, about 80% greater to about 5,000% greater, about 80% greater to about 4,000% greater, about 80% greater to about 3,000% greater, about 80% greater to about 2,000% greater, about 80% greater to about 1,000% greater, about 80% greater to about 500% greater, about 80% greater to about 480% greater, about 80% greater to about 460% greater, about 80% greater to about 440% greater, about 80% greater to about 420% greater, about 80% greater to about 400% greater, about 80% greater to about 380% greater, about 80% greater to about 360% greater, about 80% greater to about 340% greater, about 80% greater to about 320% greater, about 80% greater to about 300% greater, about 80% greater to about 280% greater, about 80% greater to about 260% greater, about 80% greater to about 240% greater, about 80% greater to about 220% greater, about 80% greater to about 200% greater, about 80% greater to about 180% greater, about 80% greater to about 160% greater, about 80% greater to about 140% greater, about 80% greater to about 120% greater, about 80% greater to about 100% greater, about 80% greater to about 95% greater, about 80% greater to about 90% greater, about 80% greater to about 85% greater, about 85% greater to about 10,000% greater, about 85% greater to about 9,000% greater, about 85% greater to about 8,000% greater, about 85% greater to about 7,000% greater, about 85% greater to about 6,000% greater, about 85% greater to about 5,000% greater, about 85% greater to about 4,000% greater, about 85% greater to about 3,000% greater, about 85% greater to about 2,000% greater, about 85% greater to about 1,000% greater, about 85% greater to about 500% greater, about 85% greater to about 480% greater, about 85% greater to about 460% greater, about 85% greater to about 440% greater, about 85% greater to about 420% greater, about 85% greater to about 400% greater, about 85% greater to about 380% greater, about 85% greater to about 360% greater, about 85% greater to about 340% greater, about 85% greater to about 320% greater, about 85% greater to about 300% greater, about 85% greater to about 280% greater, about 85% greater to about 260% greater, about 85% greater to about 240% greater, about 85% greater to about 220% greater, about 85% greater to about 200% greater, about 85% greater to about 180% greater, about 85% greater to about 160% greater, about 85% greater to about 140% greater, about 85% greater to about 120% greater, about 85% greater to about 100% greater, about 85% greater to about 95% greater, about 85% greater to about 90% greater, about 90% greater to about 10,000% greater, about 90% greater to about 9,000% greater, about 90% greater to about 8,000% greater, about 90% greater to about 7,000% greater, about 90% greater to about 6,000% greater, about 90% greater to about 5,000% greater, about 90% greater to about 4,000% greater, about 90% greater to about 3,000% greater, about 90% greater to about 2,000% greater, about 90% greater to about 1,000% greater, about 90% greater to about 500% greater, about 90% greater to about 480% greater, about 90% greater to about 460% greater, about 90% greater to about 440% greater, about 90% greater to about 420% greater, about 90% greater to about 400% greater, about 90% greater to about 380% greater, about 90% greater to about 360% greater, about 90% greater to about 340% greater, about 90% greater to about 320% greater, about 90% greater to about 300% greater, about 90% greater to about 280% greater, about 90% greater to about 260% greater, about 90% greater to about 240% greater, about 90% greater to about 220% greater, about 90% greater to about 200% greater, about 90% greater to about 180% greater, about 90% greater to about 160% greater, about 90% greater to about 140% greater, about 90% greater to about 120% greater, about 90% greater to about 100% greater, about 90% greater to about 95% greater, about 95% greater to about 10,000% greater, about 95% greater to about 9,000% greater, about 95% greater to about 8,000% greater, about 95% greater to about 7,000% greater, about 95% greater to about 6,000% greater, about 95% greater to about 5,000% greater, about 95% greater to about 4,000% greater, about 95% greater to about 3,000% greater, about 95% greater to about 2,000% greater, about 95% greater to about 1,000% greater, about 95% greater to about 500% greater, about 95% greater to about 480% greater, about 95% greater to about 460% greater, about 95% greater to about 440% greater, about 95% greater to about 420% greater, about 95% greater to about 400% greater, about 95% greater to about 380% greater, about 95% greater to about 360% greater, about 95% greater to about 340% greater, about 95% greater to about 320% greater, about 95% greater to about 300% greater, about 95% greater to about 280% greater, about 95% greater to about 260% greater, about 95% greater to about 240% greater, about 95% greater to about 220% greater, about 95% greater to about 200% greater, about 95% greater to about 180% greater, about 95% greater to about 160% greater, about 95% greater to about 140% greater, about 95% greater to about 120% greater, about 95% greater to about 100% greater, about 100% greater to about 10,000% greater, about 100% greater to about 9,000% greater, about 100% greater to about 8,000% greater, about 100% greater to about 7,000% greater, about 100% greater to about 6,000% greater, about 100% greater to about 5,000% greater, about 100% greater to about 4,000% greater, about 100% greater to about 3,000% greater, about 100% greater to about 2,000% greater, about 100% greater to about 1,000% greater, about 100% greater to about 500% greater, about 100% greater to about 480% greater, about 100% greater to about 460% greater, about 100% greater to about 440% greater, about 100% greater to about 420% greater, about 100% greater to about 400% greater, about 100% greater to about 380% greater, about 100% greater to about 360% greater, about 100% greater to about 340% greater, about 100% greater to about 320% greater, about 100% greater to about 300% greater, about 100% greater to about 280% greater, about 100% greater to about 260% greater, about 100% greater to about 240% greater, about 100% greater to about 220% greater, about 100% greater to about 200% greater, about 100% greater to about 180% greater, about 100% greater to about 160% greater, about 100% greater to about 140% greater, about 100% greater to about 120% greater, about 120% greater to about 10,000% greater, about 120% greater to about 9,000% greater, about 120% greater to about 8,000% greater, about 120% greater to about 7,000% greater, about 120% greater to about 6,000% greater, about 120% greater to about 5,000% greater, about 120% greater to about 4,000% greater, about 120% greater to about 3,000% greater, about 120% greater to about 2,000% greater, about 120% greater to about 1,000% greater, about 120% greater to about 500% greater, about 120% greater to about 480% greater, about 120% greater to about 460% greater, about 120% greater to about 440% greater, about 120% greater to about 420% greater, about 120% greater to about 400% greater, about 120% greater to about 380% greater, about 120% greater to about 360% greater, about 120% greater to about 340% greater, about 120% greater to about 320% greater, about 120% greater to about 300% greater, about 120% greater to about 280% greater, about 120% greater to about 260% greater, about 120% greater to about 240% greater, about 120% greater to about 220% greater, about 120% greater to about 200% greater, about 120% greater to about 180% greater, about 120% greater to about 160% greater, about 120% greater to about 140% greater, about 140% greater to about 10,000% greater, about 140% greater to about 9,000% greater, about 140% greater to about 8,000% greater, about 140% greater to about 7,000% greater, about 140% greater to about 6,000% greater, about 140% greater to about 5,000% greater, about 140% greater to about 4,000% greater, about 140% greater to about 3,000% greater, about 140% greater to about 2,000% greater, about 140% greater to about 1,000% greater, about 140% greater to about 500% greater, about 140% greater to about 480% greater, about 140% greater to about 460% greater, about 140% greater to about 440% greater, about 140% greater to about 420% greater, about 140% greater to about 400% greater, about 140% greater to about 380% greater, about 140% greater to about 360% greater, about 140% greater to about 340% greater, about 140% greater to about 320% greater, about 140% greater to about 300% greater, about 140% greater to about 280% greater, about 140% greater to about 260% greater, about 140% greater to about 240% greater, about 140% greater to about 220% greater, about 140% greater to about 200% greater, about 140% greater to about 180% greater, about 140% greater to about 160% greater, about 160% greater to about 10,000% greater, about 160% greater to about 9,000% greater, about 160% greater to about 8,000% greater, about 160% greater to about 7,000% greater, about 160% greater to about 6,000% greater, about 160% greater to about 5,000% greater, about 160% greater to about 4,000% greater, about 160% greater to about 3,000% greater, about 160% greater to about 2,000% greater, about 160% greater to about 1,000% greater, about 160% greater to about 500% greater, about 160% greater to about 480% greater, about 160% greater to about 460% greater, about 160% greater to about 440% greater, about 160% greater to about 420% greater, about 160% greater to about 400% greater, about 160% greater to about 380% greater, about 160% greater to about 360% greater, about 160% greater to about 340% greater, about 160% greater to about 320% greater, about 160% greater to about 300% greater, about 160% greater to about 280% greater, about 160% greater to about 260% greater, about 160% greater to about 240% greater, about 160% greater to about 220% greater, about 160% greater to about 200% greater, about 160% greater to about 180% greater, about 180% greater to about 10,000% greater, about 180% greater to about 9,000% greater, about 180% greater to about 8,000% greater, about 180% greater to about 7,000% greater, about 180% greater to about 6,000% greater, about 180% greater to about 5,000% greater, about 180% greater to about 4,000% greater, about 180% greater to about 3,000% greater, about 180% greater to about 2,000% greater, about 180% greater to about 1,000% greater, about 180% greater to about 500% greater, about 180% greater to about 480% greater, about 180% greater to about 460% greater, about 180% greater to about 440% greater, about 180% greater to about 420% greater, about 180% greater to about 400% greater, about 180% greater to about 380% greater, about 180% greater to about 360% greater, about 180% greater to about 340% greater, about 180% greater to about 320% greater, about 180% greater to about 300% greater, about 180% greater to about 280% greater, about 180% greater to about 260% greater, about 180% greater to about 240% greater, about 180% greater to about 220% greater, about 180% greater to about 200% greater, about 200% greater to about 10,000% greater, about 200% greater to about 9,000% greater, about 200% greater to about 8,000% greater, about 200% greater to about 7,000% greater, about 200% greater to about 6,000% greater, about 200% greater to about 5,000% greater, about 200% greater to about 4,000% greater, about 200% greater to about 3,000% greater, about 200% greater to about 2,000% greater, about 200% greater to about 1,000% greater, about 200% greater to about 500% greater, about 200% greater to about 480% greater, about 200% greater to about 460% greater, about 200% greater to about 440% greater, about 200% greater to about 420% greater, about 200% greater to about 400% greater, about 200% greater to about 380% greater, about 200% greater to about 360% greater, about 200% greater to about 340% greater, about 200% greater to about 320% greater, about 200% greater to about 300% greater, about 200% greater to about 280% greater, about 200% greater to about 260% greater, about 200% greater to about 240% greater, about 200% greater to about 220% greater, about 220% greater to about 10,000% greater, about 220% greater to about 9,000% greater, about 220% greater to about 8,000% greater, about 220% greater to about 7,000% greater, about 220% greater to about 6,000% greater, about 220% greater to about 5,000% greater, about 220% greater to about 4,000% greater, about 220% greater to about 3,000% greater, about 220% greater to about 2,000% greater, about 220% greater to about 1,000% greater, about 220% greater to about 500% greater, about 220% greater to about 480% greater, about 220% greater to about 460% greater, about 220% greater to about 440% greater, about 220% greater to about 420% greater, about 220% greater to about 400% greater, about 220% greater to about 380% greater, about 220% greater to about 360% greater, about 220% greater to about 340% greater, about 220% greater to about 320% greater, about 220% greater to about 300% greater, about 220% greater to about 280% greater, about 220% greater to about 260% greater, about 220% greater to about 240% greater, about 240% greater to about 10,000% greater, about 240% greater to about 9,000% greater, about 240% greater to about 8,000% greater, about 240% greater to about 7,000% greater, about 240% greater to about 6,000% greater, about 240% greater to about 5,000% greater, about 240% greater to about 4,000% greater, about 240% greater to about 3,000% greater, about 240% greater to about 2,000% greater, about 240% greater to about 1,000% greater, about 240% greater to about 500% greater, about 240% greater to about 480% greater, about 240% greater to about 460% greater, about 240% greater to about 440% greater, about 240% greater to about 420% greater, about 240% greater to about 400% greater, about 240% greater to about 380% greater, about 240% greater to about 360% greater, about 240% greater to about 340% greater, about 240% greater to about 320% greater, about 240% greater to about 300% greater, about 240% greater to about 280% greater, about 240% greater to about 260% greater, about 260% greater to about 10,000% greater, about 260% greater to about 9,000% greater, about 260% greater to about 8,000% greater, about 260% greater to about 7,000% greater, about 260% greater to about 6,000% greater, about 260% greater to about 5,000% greater, about 260% greater to about 4,000% greater, about 260% greater to about 3,000% greater, about 260% greater to about 2,000% greater, about 260% greater to about 1,000% greater, about 260% greater to about 500% greater, about 260% greater to about 480% greater, about 260% greater to about 460% greater, about 260% greater to about 440% greater, about 260% greater to about 420% greater, about 260% greater to about 400% greater, about 260% greater to about 380% greater, about 260% greater to about 360% greater, about 260% greater to about 340% greater, about 260% greater to about 320% greater, about 260% greater to about 300% greater, about 260% greater to about 280% greater, about 280% greater to about 10,000% greater, about 280% greater to about 9,000% greater, about 280% greater to about 8,000% greater, about 280% greater to about 7,000% greater, about 280% greater to about 6,000% greater, about 280% greater to about 5,000% greater, about 280% greater to about 4,000% greater, about 280% greater to about 3,000% greater, about 280% greater to about 2,000% greater, about 280% greater to about 1,000% greater, about 280% greater to about 500% greater, about 280% greater to about 480% greater, about 280% greater to about 460% greater, about 280% greater to about 440% greater, about 280% greater to about 420% greater, about 280% greater to about 400% greater, about 280% greater to about 380% greater, about 280% greater to about 360% greater, about 280% greater to about 340% greater, about 280% greater to about 320% greater, about 280% greater to about 300% greater, about 300% greater to about 10,000% greater, about 300% greater to about 9,000% greater, about 300% greater to about 8,000% greater, about 300% greater to about 7,000% greater, about 300% greater to about 6,000% greater, about 300% greater to about 5,000% greater, about 300% greater to about 4,000% greater, about 300% greater to about 3,000% greater, about 300% greater to about 2,000% greater, about 300% greater to about 1,000% greater, about 300% greater to about 500% greater, about 300% greater to about 480% greater, about 300% greater to about 460% greater, about 300% greater to about 440% greater, about 300% greater to about 420% greater, about 300% greater to about 400% greater, about 300% greater to about 380% greater, about 300% greater to about 360% greater, about 300% greater to about 340% greater, about 300% greater to about 320% greater, about 320% greater to about 10,000% greater, about 320% greater to about 9,000% greater, about 320% greater to about 8,000% greater, about 320% greater to about 7,000% greater, about 320% greater to about 6,000% greater, about 320% greater to about 5,000% greater, about 320% greater to about 4,000% greater, about 320% greater to about 3,000% greater, about 320% greater to about 2,000% greater, about 320% greater to about 1,000% greater, about 320% greater to about 500% greater, about 320% greater to about 480% greater, about 320% greater to about 460% greater, about 320% greater to about 440% greater, about 320% greater to about 420% greater, about 320% greater to about 400% greater, about 320% greater to about 380% greater, about 320% greater to about 360% greater, about 320% greater to about 340% greater, about 340% greater to about 10,000% greater, about 340% greater to about 9,000% greater, about 340% greater to about 8,000% greater, about 340% greater to about 7,000% greater, about 340% greater to about 6,000% greater, about 340% greater to about 5,000% greater, about 340% greater to about 4,000% greater, about 340% greater to about 3,000% greater, about 340% greater to about 2,000% greater, about 340% greater to about 1,000% greater, about 340% greater to about 500% greater, about 340% greater to about 480% greater, about 340% greater to about 460% greater, about 340% greater to about 440% greater, about 340% greater to about 420% greater, about 340% greater to about 400% greater, about 340% greater to about 380% greater, about 340% greater to about 360% greater, about 360% greater to about 10,000% greater, about 360% greater to about 9,000% greater, about 360% greater to about 8,000% greater, about 360% greater to about 7,000% greater, about 360% greater to about 6,000% greater, about 360% greater to about 5,000% greater, about 360% greater to about 4,000% greater, about 360% greater to about 3,000% greater, about 360% greater to about 2,000% greater, about 360% greater to about 1,000% greater, about 360% greater to about 500% greater, about 360% greater to about 480% greater, about 360% greater to about 460% greater, about 360% greater to about 440% greater, about 360% greater to about 420% greater, about 360% greater to about 400% greater, about 360% greater to about 380% greater, about 380% greater to about 10,000% greater, about 380% greater to about 9,000% greater, about 380% greater to about 8,000% greater, about 380% greater to about 7,000% greater, about 380% greater to about 6,000% greater, about 380% greater to about 5,000% greater, about 380% greater to about 4,000% greater, about 380% greater to about 3,000% greater, about 380% greater to about 2,000% greater, about 380% greater to about 1,000% greater, about 380% greater to about 500% greater, about 380% greater to about 480% greater, about 380% greater to about 460% greater, about 380% greater to about 440% greater, about 380% greater to about 420% greater, about 380% greater to about 400% greater, about 400% greater to about 10,000% greater, about 400% greater to about 9,000% greater, about 400% greater to about 8,000% greater, about 400% greater to about 7,000% greater, about 400% greater to about 6,000% greater, about 400% greater to about 5,000% greater, about 400% greater to about 4,000% greater, about 400% greater to about 3,000% greater, about 400% greater to about 2,000% greater, about 400% greater to about 1,000% greater, about 400% greater to about 500% greater, about 400% greater to about 480% greater, about 400% greater to about 460% greater, about 400% greater to about 440% greater, about 400% greater to about 420% greater, about 420% greater to about 10,000% greater, about 420% greater to about 9,000% greater, about 420% greater to about 8,000% greater, about 420% greater to about 7,000% greater, about 420% greater to about 6,000% greater, about 420% greater to about 5,000% greater, about 420% greater to about 4,000% greater, about 420% greater to about 3,000% greater, about 420% greater to about 2,000% greater, about 420% greater to about 1,000% greater, about 420% greater to about 500% greater, about 420% greater to about 480% greater, about 420% greater to about 460% greater, about 420% greater to about 440% greater, about 440% greater to about 10,000% greater, about 440% greater to about 9,000% greater, about 440% greater to about 8,000% greater, about 440% greater to about 7,000% greater, about 440% greater to about 6,000% greater, about 440% greater to about 5,000% greater, about 440% greater to about 4,000% greater, about 440% greater to about 3,000% greater, about 440% greater to about 2,000% greater, about 440% greater to about 1,000% greater, about 440% greater to about 500% greater, about 440% greater to about 480% greater, about 440% greater to about 460% greater, about 460% greater to about 10,000% greater, about 460% greater to about 9,000% greater, about 460% greater to about 8,000% greater, about 460% greater to about 7,000% greater, about 460% greater to about 6,000% greater, about 460% greater to about 5,000% greater, about 460% greater to about 4,000% greater, about 460% greater to about 3,000% greater, about 460% greater to about 2,000% greater, about 460% greater to about 1,000% greater, about 460% greater to about 500% greater, about 460% greater to about 480% greater, about 480% greater to about 10,000% greater, about 480% greater to about 9,000% greater, about 480% greater to about 8,000% greater, about 480% greater to about 7,000% greater, about 480% greater to about 6,000% greater, about 480% greater to about 5,000% greater, about 480% greater to about 4,000% greater, about 480% greater to about 3,000% greater, about 480% greater to about 2,000% greater, about 480% greater to about 1,000% greater, about 480% greater to about 500% greater, about 500% greater to about 10,000% greater, about 500% greater to about 9,000% greater, about 500% greater to about 8,000% greater, about 500% greater to about 7,000% greater, about 500% greater to about 6,000% greater, about 500% greater to about 5,000% greater, about 500% greater to about 4,000% greater, about 500% greater to about 3,000% greater, about 500% greater to about 2,000% greater, about 500% greater to about 1,000% greater, about 1,000% greater to about 10,000% greater, about 1,000% greater to about 9,000% greater, about 1,000% greater to about 8,000% greater, about 1,000% greater to about 7,000% greater, about 1,000% greater to about 6,000% greater, about 1,000% greater to about 5,000% greater, about 1,000% greater to about 4,000% greater, about 1,000% greater to about 3,000% greater, about 1,000% greater to about 2,000% greater, about 2,000% greater to about 10,000% greater, about 2,000% greater to about 9,000% greater, about 2,000% greater to about 8,000% greater, about 2,000% greater to about 7,000% greater, about 2,000% greater to about 6,000% greater, about 2,000% greater to about 5,000% greater, about 2,000% greater to about 4,000% greater, about 2,000% greater to about 3,000% greater, about 3,000% greater to about 10,000% greater, about 3,000% greater to about 9,000% greater, about 3,000% greater to about 8,000% greater, about 3,000% greater to about 7,000% greater, about 3,000% greater to about 6,000% greater, about 3,000% greater to about 5,000% greater, about 3,000% greater to about 4,000% greater, about 4,000% greater to about 10,000% greater, about 4,000% greater to about 9,000% greater, about 4,000% greater to about 8,000% greater, about 4,000% greater to about 7,000% greater, about 4,000% greater to about 6,000% greater, about 4,000% greater to about 5,000% greater, about 5,000% greater to about 10,000% greater, about 5,000% greater to about 9,000% greater, about 5,000% greater to about 8,000% greater, about 5,000% greater to about 7,000% greater, about 5,000% greater to about 6,000% greater, about 6,000% greater to about 10,000% greater, about 6,000% greater to about 9,000% greater, about 6,000% greater to about 8,000% greater, about 6,000% greater to about 7,000% greater, about 7,000% greater to about 10,000% greater, about 7,000% greater to about 9,000% greater, about 7,000% greater to about 8,000% greater, about 8,000% greater to about 10,000% greater, about 8,000% greater to about 9,000% greater, or about 9,000% greater to about 10,000% greater) than the K_{D} at a pH of about 7.0 to about 8.0 (e.g., any of the subranges of this range described herein).

[0668] In some embodiments of any of the antigen-binding protein constructs (ABPCs) described herein, the dissociation rate of the first antigen-binding domain (and optionally the second antigen-binding domain, if present) at a pH of about 4.0 to about 6.5 (e.g., any of the subranges of this range described herein) is faster (e.g., at least 0.2-fold faster, at least 0.3-fold, at least 0.4-fold, at least 0.5-fold, at least 0.6-fold, at least 0.7-fold, at least 0.8-fold, at least 0.9-fold, at least 1.0-fold, at least 1.5-fold, at least 2.0-fold, at least 2.5-fold, at least 3.0 fold, at least 3.5-fold, at least 4.0-fold, at least 4.5-fold, at least 5.0-fold, at least 5.5-fold, at least 6.0-fold, at least 6.5-fold, at least 7.0-fold, at least 7.5-fold, at least 8.0-fold, at least 8.5-fold, at least 9.0-fold, at least 9.5-fold, at least 10.0-fold, at least 10.5-fold, at least 11.0-fold, at least 11.5-fold, at least 12.0-fold, at least 12.5-fold, at least 13.0-fold, at least 13.5-fold, at least 14.0-fold, at least 14.5-fold, at least 15.0-fold, at least 15.5-fold, at least 16.0-fold, at least 16.5-fold, at least 17.0-fold, at least 17.5-fold, at least 18.0-fold, at least 18.5-fold, at least 19.0-fold, at least 19.5-fold, at least 20-fold, at least 25-fold, at least 30-fold, at least 35-fold, at least 40-fold, at least 45-fold, at least 50-fold, at least 55-fold, at least 60-fold, at least 65-fold, at least 70-fold, at least 75-fold, at least 80-fold, at least 85-fold, at least 90-fold, at least 95-fold, or at least 100-fold faster or about 0.2-fold to about 100-fold faster, about 0.2-fold to about 90-fold faster, about 0.2-fold to about 80-fold faster, about 0.2-fold to about 70-fold faster, about 0.2-fold to about 60-fold faster, about 0.2-fold to about 50-fold faster, about 0.2-fold to about 40-fold faster, about 0.2-fold to about 30-fold faster, about 0.2-fold to about 20-fold faster, about 0.2-fold to about 15-fold faster, about 0.2-fold to about 10-fold faster, about 0.2-fold to about 5-fold, about 0.2-fold to about 2-fold faster, about 0.2-fold to about 1-fold faster, about 0.2-fold to about 0.5-fold faster, about 0.5-fold to about 100-fold faster, about 0.5-fold to about 90-fold faster, about 0.5-fold to about 80-fold faster, about 0.5-fold to about 70-fold faster, about 0.5-fold to about 60-fold faster, about 0.5-fold to about 50-fold faster, about 0.5-fold to about 40-fold faster, about 0.5-fold to about 30-fold faster, about 0.5-fold to about 20-fold faster, about 0.5-fold to about 15-fold faster, about 0.5-fold to about 10-fold faster, about 0.5-fold to about 5-fold, about 0.5-fold to about 2-fold faster, about 0.5-fold to about 1-fold faster, about 1-fold to about 100-fold faster, about 1-fold to about 90-fold faster, about 1-fold to about 80-fold faster, about 1-fold to about 70-fold faster, about 1-fold to about 60-fold faster, about 1-fold to about 50-fold faster, about 1-fold to about 40-fold faster, about 1-fold to about 30-fold faster, about 1-fold to about 20-fold faster, about 1-fold to about 15-fold faster, about 1-fold to about 10-fold faster, about 1-fold to about 5-fold, about 1-fold to about 2-fold faster, about 2-fold to about 100-fold faster, about 2-fold to about 90-fold faster, about 2-fold to about 80-fold faster, about 2-fold to about 70-fold faster, about 2-fold to about 60-fold faster, about 2-fold to about 50-fold faster, about 2-fold to about 40-fold faster, about 2-fold to about 30-fold faster, about 2-fold to about 20-fold faster, about 2-fold to about 15-fold faster, about 2-fold to about 10-fold faster, about 2-fold to about 5-fold, about 5-fold to about 100-fold faster, about 5-fold to about 90-fold faster, about 5-fold to about 80-fold faster, about 5-fold to about 70-fold faster, about 5-fold to about 60-fold faster, about 5-fold to about 50-fold faster, about 5-fold to about 40-fold faster, about 5-fold to about 30-fold faster, about 5-fold to about 20-fold faster, about 5-fold to about 15-fold faster, about 5-fold to about 10-fold faster, about 10-fold to about 100-fold faster, about 10-fold to about 90-fold faster, about 10-fold to about 80-fold faster, about 10-fold to about 70-fold faster, about 10-fold to about 60-fold faster, about 10-fold to about 50-fold faster, about 10-fold to about 40-fold faster, about 10-fold to about 30-fold faster, about 10-fold to about 20-fold faster, about 10-fold to about 15-fold faster, about 15-fold to about 100-fold faster, about 15-fold to about 90-fold faster, about 15-fold to about 80-fold faster, about 15-fold to about 70-fold faster, about 15-fold to about 60-fold faster, about 15-fold to about 50-fold faster, about 15-fold to about 40-fold faster, about 15-fold to about 30-fold faster, about 15-fold to about 20-fold faster, about 20-fold to about 100-fold faster, about 20-fold to about 90-fold faster, about 20-fold to about 80-fold faster, about 20-fold to about 70-fold faster, about 20-fold to about 60-fold faster, about 20-fold to about 50-fold faster, about 20-fold to about 40-fold faster, about 20-fold to about 30-fold faster, about 30-fold to about 100-fold faster, about 30-fold to about 90-fold faster, about 30-fold to about 80-fold faster, about 30-fold to about 70-fold faster, about 30-fold to about 60-fold faster, about 30-fold to about 50-fold faster, about 30-fold to about 40-fold faster, about 40-fold to about 100-fold faster, about 40-fold to about 90-fold faster, about 40-fold to about 80-fold faster, about 40-fold to about 70-fold faster, about 40-fold to about 60-fold faster, about 40-fold to about 50-fold faster, about 50-fold to about 100-fold faster, about 50-fold to about 90-fold faster, about 50-fold to about 80-fold faster, about 50-fold to about 70-fold faster, about 50-fold to about 60-fold faster, about 60-fold to about 100-fold faster, about 60-fold to about 90-fold faster, about 60-fold to about 80-fold faster, about 60-fold to about 70-fold faster, about 70-fold to about 100-fold faster, about 70-fold to about 90-fold faster, about 70-fold to about 80-fold faster, about 80-fold to about 100-fold faster, about 80-fold to about 90-fold faster, or about 90-fold to about 100-fold faster) than the dissociation rate at a pH of about 7.0 to about 8.0 (e.g., or any of the subranges of this range described herein).

[0669] In some embodiments of any of the antigen-binding protein constructs (ABPCs) described herein, the dissociation constant (K_{D}) of the first antigen-binding domain (and optionally the second antigen-binding domain, if present) at a pH of about 4.0 to about 6.5 (e.g., any of the subranges of this range described herein) is greater (e.g., detectably greater) (e.g., at least 0.2-fold greater, at least 0.3-fold, at least 0.4-fold, at least 0.5-fold, at least 0.6-fold, at least 0.7-fold, at least 0.8-fold, at least 0.9-fold, at least 1.0-fold, at least 1.5-fold, at least 2.0-fold, at least 2.5-fold, at least 3.0 fold, at least 3.5-fold, at least 4.0-fold, at least 4.5-fold, at least 5.0-fold, at least 5.5-fold, at least 6.0-fold, at least 6.5-fold, at least 7.0-fold, at least 7.5-fold, at least 8.0-fold, at least 8.5-fold, at least 9.0-fold, at least 9.5-fold, at least 10.0-fold, at least 10.5-fold, at least 11.0-fold, at least 11.5-fold, at least 12.0-fold, at least 12.5-fold, at least 13.0-fold, at least 13.5-fold, at least 14.0-fold, at least 14.5-fold, at least 15.0-fold, at least 15.5-fold, at least 16.0-fold, at least 16.5-fold, at least 17.0-fold, at least 17.5-fold, at least 18.0-fold, at least 18.5-fold, at least 19.0-fold, at least 19.5-fold, at least 20-fold greater, at least 25-fold greater, at least 30-fold greater, at least 35-fold greater, at least 40-fold greater, at least 45-fold greater, at least 50-fold greater, at least 55-fold greater, at least 60-fold greater, at least 65-fold greater, at least 70-fold greater, at least 75-fold greater, at least 80-fold greater, at least 85-fold greater, at least 90-fold greater, at least 95-fold greater, or at least 100-fold greater, or about 0.2-fold to about 100-fold greater, about 0.2-fold to about 90-fold greater, about 0.2-fold to about 80-fold greater, about 0.2-fold to about 70-fold greater, about 0.2-fold to about 60-fold greater, about 0.2-fold to about 50-fold greater, about 0.2-fold to about 40-fold greater, about 0.2-fold to about 30-fold greater, about 0.2-fold to about 25-fold greater, about 0.2-fold to about 20-fold greater, about 0.2-fold to about 15-fold greater, about 0.2-fold to about 10-fold greater, about 0.2-fold to about 8-fold greater, about 0.2-fold to about 5-fold greater, about 0.2-fold to about 2-fold greater, about 0.2-fold to about 1-fold greater, about 0.2-fold to about 0.5-fold greater, about 0.5-fold to about 100-fold greater, about 0.5-fold to about 90-fold greater, about 0.5-fold to about 80-fold greater, about 0.5-fold to about 70-fold greater, about 0.5-fold to about 60-fold greater, about 0.5-fold to about 50-fold greater, about 0.5-fold to about 40-fold greater, about 0.5-fold to about 30-fold greater, about 0.5-fold to about 25-fold greater, about 0.5-fold to about 20-fold greater, about 0.5-fold to about 15-fold greater, about 0.5-fold to about 10-fold greater, about 0.5-fold to about 8-fold greater, about 0.5-fold to about 5-fold greater, about 0.5-fold to about 2-fold greater, about 0.5-fold to about 1-fold greater, about 1-fold to about 100-fold greater, about 1-fold to about 90-fold greater, about 1-fold to about 80-fold greater, about 1-fold to about 70-fold greater, about 1-fold to about 60-fold greater, about 1-fold to about 50-fold greater, about 1-fold to about 40-fold greater, about 1-fold to about 30-fold greater, about 1-fold to about 25-fold greater, about 1-fold to about 20-fold greater, about 1-fold to about 15-fold greater, about 1-fold to about 10-fold greater, about 1-fold to about 8-fold greater, about 1-fold to about 5-fold greater, about 1-fold to about 2-fold greater, about 2-fold to about 100-fold greater, about 2-fold to about 90-fold greater, about 2-fold to about 80-fold greater, about 2-fold to about 70-fold greater, about 2-fold to about 60-fold greater, about 2-fold to about 50-fold greater, about 2-fold to about 40-fold greater, about 2-fold to about 30-fold greater, about 2-fold to about 25-fold greater, about 2-fold to about 20-fold greater, about 2-fold to about 15-fold greater, about 2-fold to about 10-fold greater, about 2-fold to about 8-fold greater, about 2-fold to about 5-fold greater, about 5-fold to about 100-fold greater, about 5-fold to about 90-fold greater, about 5-fold to about 80-fold greater, about 5-fold to about 70-fold greater, about 5-fold to about 60-fold greater, about 5-fold to about 50-fold greater, about 5-fold to about 40-fold greater, about 5-fold to about 30-fold greater, about 5-fold to about 25-fold greater, about 5-fold to about 20-fold greater, about 5-fold to about 15-fold greater, about 5-fold to about 10-fold greater, about 5-fold to about 8-fold greater, about 8-fold to about 100-fold greater, about 8-fold to about 90-fold greater, about 8-fold to about 80-fold greater, about 8-fold to about 70-fold greater, about 8-fold to about 60-fold greater, about 8-fold to about 50-fold greater, about 8-fold to about 40-fold greater, about 8-fold to about 30-fold greater, about 8-fold to about 25-fold greater, about 8-fold to about 20-fold greater, about 8-fold to about 15-fold greater, about 8-fold to about 10-fold greater, about 10-fold to about 100-fold greater, about 10-fold to about 90-fold greater, about 10-fold to about 80-fold greater, about 10-fold to about 70-fold greater, about 10-fold to about 60-fold greater, about 10-fold to about 50-fold greater, about 10-fold to about 40-fold greater, about 10-fold to about 30-fold greater, about 10-fold to about 25-fold greater, about 10-fold to about 20-fold greater, about 10-fold to about 15-fold greater, about 15-fold to about 100-fold greater, about 15-fold to about 90-fold greater, about 15-fold to about 80-fold greater, about 15-fold to about 70-fold greater, about 15-fold to about 60-fold greater, about 15-fold to about 50-fold greater, about 15-fold to about 40-fold greater, about 15-fold to about 30-fold greater, about 15-fold to about 25-fold greater, about 15-fold to about 20-fold greater, about 20-fold to about 100-fold greater, about 20-fold to about 90-fold greater, about 20-fold to about 80-fold greater, about 20-fold to about 70-fold greater, about 20-fold to about 60-fold greater, about 20-fold to about 50-fold greater, about 20-fold to about 40-fold greater, about 20-fold to about 30-fold greater, about 20-fold to about 25-fold greater, about 25-fold to about 100-fold greater, about 25-fold to about 90-fold greater, about 25-fold to about 80-fold greater, about 25-fold to about 70-fold greater, about 25-fold to about 60-fold greater, about 25-fold to about 50-fold greater, about 25-fold to about 40-fold greater, about 25-fold to about 30-fold greater, about 30-fold to about 100-fold greater, about 30-fold to about 90-fold greater, about 30-fold to about 80-fold greater, about 30-fold to about 70-fold greater, about 30-fold to about 60-fold greater, about 30-fold to about 50-fold greater, about 30-fold to about 40-fold greater, about 40-fold to about 100-fold greater, about 40-fold to about 90-fold greater, about 40-fold to about 80-fold greater, about 40-fold to about 70-fold greater, about 40-fold to about 60-fold greater, about 40-fold to about 50-fold greater, about 50-fold to about 100-fold greater, about 50-fold to about 90-fold greater, about 50-fold to about 80-fold greater, about 50-fold to about 70-fold greater, about 50-fold to about 60-fold greater, about 60-fold to about 100-fold greater, about 60-fold to about 90-fold greater, about 60-fold to about 80-fold greater, about 60-fold to about 70-fold greater, about 70-fold to about 100-fold greater, about 70-fold to about 90-fold greater, about 70-fold to about 80-fold greater, about 80-fold to about 100-fold greater, about 80-fold to about 90-fold greater, or about 90-fold to about 100-fold greater), than the K_{D} at a pH of about 7.0 to about 8.0 (e.g., any of the subranges of this range described herein).

[0670] In some embodiments of the ABPCs that include a first antigen-binding domain and a second antigen-binding domain, the first and second antigen-binding domains are identical or are at least 80% identical (e.g., at least 82%, at least 84%, at least 86%, at least 88%, at least 90%, at least 91%, at least 92%, at least 93%, at least 94%, at least 95%, at least 96%, at least 97%, at least 98%, or at least 99% identical) in amino acid sequence to each other. In some embodiments, the ABPCs that include a first antigen-binding domain and a second antigen-binding domain, the first antigen-binding domain and the second antigen-binding domain have a sequence that is less than 80% identical (e.g., less than 75% identical, less than 70% identical, less than 65% identical, less than 60% identical, less than 55% identical, less than 50% identical, less than 45% identical, less than 40% identical, less than 35% identical, less than 30% identical, less than 25% identical, less than 20% identical, less than 15% identical, less than 10% identical, or less than 5% identical) to each other. In some embodiments of ABPCs that include a first and a second antigen-binding domain, the first and second antigen-binding domain binds two different epitopes (e.g., two different epitopes on DLL3 or the first antigen-binding domain binding specifically to DLL3 and the second antigen-binding domain binding to an antigen other than DLL3).

[0671] In some embodiments of any of the ABPCs described herein, the K_{D} of the first antigen-binding domain (and optionally, the second antigen-binding domain if present) at a pH of about 7.0 to about 8.0 (e.g., any of the subranges of this range described herein) is between about 1 pM to about 5 μM (e.g., about 1 pM to about 2 μM, about 1 pM to about 1 μM, about 1 pM to about 500 nM, about 1 pM to about 250 nM, about 1 pM to about 240 nM, about 1 pM to about 230 nM, about 1 pM to about 220 nM, about 1 pM to about 210 nM, about 1 pM to about 200 nM, about 1 pM to about 190 nM, about 1 pM to about 180 nM, about 1 pM to about 170 nM, about 1 pM to about 160 nM, about 1 pM to about 150 nM, about 1 pM to about 140 nM, about 1 pM to about 130 nM, about 1 pM to about 120 nM, about 1 pM to about 110 nM, about 1 pM to about 100 nM, about 1 pM to about 95 nM, about 1 pM to about 90 nM, about 1 pM to about 85 nM, about 1 pM to about 80 nM, about 1 pM to about 75 nM, about 1 pM to about 70 nM, about 1 pM to about 65 nM, about 1 pM to about 60 nM, about 1 pM to about 55 nM, about 1 pM to about 50 nM, about 1 pM to about 45 nM, about 1 pM to about 40 nM, about 1 pM to about 35 nM, about 1 pM to about 30 nM, about 1 pM to about 25 nM, about 1 pM to about 20 nM, about 1 pM to about 15 nM, about 1 pM to about 10 nM, about 1 pM to about 5 nM, about 1 pM to about 2 nM, about 1 pM to about 1 nM, about 1 pM to about 950 pM, about 1 pM to about 900 pM, about 1 pM to about 850 pM, about 1 pM to about 800 pM, about 1 pM to about 750 pM, about 1 pM to about 700 pM, about 1 pM to about 650 pM, about 1 pM to about 600 pM, about 1 pM to about 550 pM, about 1 pM to about 500 pM, about 1 pM to about 450 pM, about 1 pM to about 400 pM, about 1 pM to about 350 pM, about 1 pM to about 300 pM, about 1 pM to about 250 pM, about 1 pM to about 200 pM, about 1 pM to about 150 pM, about 1 pM to about 100 pM, about 1 pM to about 90 pM, about 1 pM to about 80 pM, about 1 pM to about 70 pM, about 1 pM to about 60 pM, about 1 pM to about 50 pM, about 1 pM to about 40 pM, about 1 pM to about 30 pM, about 1 pM to about 20 pM, about 1 pM to about 10 pM, about 1 pM to about 5 pM, about 1 pM to about 4 pM, about 1 pM to about 3 pM, about 1 pM to about 2 μM, about 2 pM to about 5 μM, about 2 pM to about 2 μM, about 2 pM to about 1 μM, about 2 pM to about 500 nM, about 2 pM to about 250 nM, about 2 pM to about 240 nM, about 2 pM to about 230 nM, about 2 pM to about 220 nM, about 2 pM to about 210 nM, about 2 pM to about 200 nM, about 2 pM to about 190 nM, about 2 pM to about 180 nM, about 2 pM to about 170 nM, about 2 pM to about 160 nM, about 2 pM to about 150 nM, about 2 pM to about 140 nM, about 2 pM to about 130 nM, about 2 pM to about 120 nM, about 2 pM to about 110 nM, about 2 pM to about 100 nM, about 2 pM to about 95 nM, about 2 pM to about 90 nM, about 2 pM to about 85 nM, about 2 pM to about 80 nM, about 2 pM to about 75 nM, about 2 pM to about 70 nM, about 2 pM to about 65 nM, about 2 pM to about 60 nM, about 2 pM to about 55 nM, about 2 pM to about 50 nM, about 2 pM to about 45 nM, about 2 pM to about 40 nM, about 2 pM to about 35 nM, about 2 pM to about 30 nM, about 2 pM to about 25 nM, about 2 pM to about 20 nM, about 2 pM to about 15 nM, about 2 pM to about 10 nM, about 2 pM to about 5 nM, about 2 pM to about 2 nM, about 2 pM to about 1 nM, about 2 pM to about 950 pM, about 2 pM to about 900 pM, about 2 pM to about 850 pM, about 2 pM to about 800 pM, about 2 pM to about 750 pM, about 2 pM to about 700 pM, about 2 pM to about 650 pM, about 2 pM to about 600 pM, about 2 pM to about 550 pM, about 2 pM to about 500 pM, about 2 pM to about 450 pM, about 2 pM to about 400 pM, about 2 pM to about 350 pM, about 2 pM to about 300 pM, about 2 pM to about 250 pM, about 2 pM to about 200 pM, about 2 pM to about 150 pM, about 2 pM to about 100 pM, about 2 pM to about 90 pM, about 2 pM to about 80 pM, about 2 pM to about 70 pM, about 2 pM to about 60 pM, about 2 pM to about 50 pM, about 2 pM to about 40 pM, about 2 pM to about 30 pM, about 2 pM to about 20 pM, about 2 pM to about 10 pM, about 2 pM to about 5 pM, about 2 pM to about 4 pM, about 2 pM to about 3 pM, about 5 pM to about 5 μM, about 5 pM to about 2 μM, about 5 pM to about 1 μM, about 5 pM to about 500 nM, about 5 pM to about 250 nM, about 5 pM to about 240 nM, about 5 pM to about 230 nM, about 5 pM to about 220 nM, about 5 pM to about 210 nM, about 5 pM to about 200 nM, about 5 pM to about 190 nM, about 5 pM to about 180 nM, about 5 pM to about 170 nM, about 5 pM to about 160 nM, about 5 pM to about 150 nM, about 5 pM to about 140 nM, about 5 pM to about 130 nM, about 5 pM to about 120 nM, about 5 pM to about 110 nM, about 5 pM to about 100 nM, about 5 pM to about 95 nM, about 5 pM to about 90 nM, about 5 pM to about 85 nM, about 5 pM to about 80 nM, about 5 pM to about 75 nM, about 5 pM to about 70 nM, about 5 pM to about 65 nM, about 5 pM to about 60 nM, about 5 pM to about 55 nM, about 5 pM to about 50 nM, about 5 pM to about 45 nM, about 5 pM to about 40 nM, about 5 pM to about 35 nM, about 5 pM to about 30 nM, about 5 pM to about 25 nM, about 5 pM to about 20 nM, about 5 pM to about 15 nM, about 5 pM to about 10 nM, about 5 pM to about 5 nM, about 5 pM to about 2 nM, about 5 pM to about 1 nM, about 5 pM to about 950 pM, about 5 pM to about 900 pM, about 5 pM to about 850 pM, about 5 pM to about 800 pM, about 5 pM to about 750 pM, about 5 pM to about 700 pM, about 5 pM to about 650 pM, about 5 pM to about 600 pM, about 5 pM to about 550 pM, about 5 pM to about 500 pM, about 5 pM to about 450 pM, about 5 pM to about 400 pM, about 5 pM to about 350 pM, about 5 pM to about 300 pM, about 5 pM to about 250 pM, about 5 pM to about 200 pM, about 5 pM to about 150 pM, about 5 pM to about 100 pM, about 5 pM to about 90 pM, about 5 pM to about 80 pM, about 5 pM to about 70 pM, about 5 pM to about 60 pM, about 5 pM to about 50 pM, about 5 pM to about 40 pM, about 5 pM to about 30 pM, about 5 pM to about 20 pM, about 5 pM to about 10 pM, about 10 pM to about 5 pM, about 10 pM to about 2 pM, about 10 pM to about 1 μM, about 10 pM to about 500 nM, about 10 pM to about 250 nM, about 10 pM to about 240 nM, about 10 pM to about 230 nM, about 10 pM to about 220 nM, about 10 pM to about 210 nM, about 10 pM to about 200 nM, about 10 pM to about 190 nM, about 10 pM to about 180 nM, about 10 pM to about 170 nM, about 10 pM to about 160 nM, about 10 pM to about 150 nM, about 10 pM to about 140 nM, about 10 pM to about 130 nM, about 10 pM to about 120 nM, about 10 pM to about 110 nM, about 10 pM to about 100 nM, about 10 pM to about 95 nM, about 10 pM to about 90 nM, about 10 pM to about 85 nM, about 10 pM to about 80 nM, about 10 pM to about 75 nM, about 10 pM to about 70 nM, about 10 pM to about 65 nM, about 10 pM to about 60 nM, about 10 pM to about 55 nM, about 10 pM to about 50 nM, about 10 pM to about 45 nM, about 10 pM to about 40 nM, about 10 pM to about 35 nM, about 10 pM to about 30 nM, about 10 pM to about 25 nM, about 10 pM to about 20 nM, about 10 pM to about 15 nM, about 10 pM to about 10 nM, about 10 pM to about 5 nM, about 10 pM to about 2 nM, about 10 pM to about 1 nM, about 10 pM to about 950 pM, about 10 pM to about 900 pM, about 10 pM to about 850 pM, about 10 pM to about 800 pM, about 10 pM to about 750 pM, about 10 pM to about 700 pM, about 10 pM to about 650 pM, about 10 pM to about 600 pM, about 10 pM to about 550 pM, about 10 pM to about 500 pM, about 10 pM to about 450 pM, about 10 pM to about 400 pM, about 10 pM to about 350 pM, about 10 pM to about 300 pM, about 10 pM to about 250 pM, about 10 pM to about 200 pM, about 10 pM to about 150 pM, about 10 pM to about 100 pM, about 10 pM to about 90 pM, about 10 pM to about 80 pM, about 10 pM to about 70 pM, about 10 pM to about 60 pM, about 10 pM to about 50 pM, about 10 pM to about 40 pM, about 10 pM to about 30 pM, about 10 pM to about 20 pM, about 15 pM to about 5 μM, about 15 pM to about 2 μM, about 15 pM to about 1 μM, about 15 pM to about 500 nM, about 15 pM to about 250 nM, about 15 pM to about 240 nM, about 15 pM to about 230 nM, about 15 pM to about 220 nM, about 15 pM to about 210 nM, about 15 pM to about 200 nM, about 15 pM to about 190 nM, about 15 pM to about 180 nM, about 15 pM to about 170 nM, about 15 pM to about 160 nM, about 15 pM to about 150 nM, about 15 pM to about 140 nM, about 15 pM to about 130 nM, about 15 pM to about 120 nM, about 15 pM to about 110 nM, about 15 pM to about 100 nM, about 15 pM to about 95 nM, about 15 pM to about 90 nM, about 15 pM to about 85 nM, about 15 pM to about 80 nM, about 15 pM to about 75 nM, about 15 pM to about 70 nM, about 15 pM to about 65 nM, about 15 pM to about 60 nM, about 15 pM to about 55 nM, about 15 pM to about 50 nM, about 15 pM to about 45 nM, about 15 pM to about 40 nM, about 15 pM to about 35 nM, about 15 pM to about 30 nM, about 15 pM to about 25 nM, about 15 pM to about 20 nM, about 15 pM to about 15 nM, about 15 pM to about 10 nM, about 15 pM to about 5 nM, about 15 pM to about 2 nM, about 15 pM to about 1 nM, about 15 pM to about 950 pM, about 15 pM to about 900 pM, about 15 pM to about 850 pM, about 15 pM to about 800 pM, about 15 pM to about 750 pM, about 15 pM to about 700 pM, about 15 pM to about 650 pM, about 15 pM to about 600 pM, about 15 pM to about 550 pM, about 15 pM to about 500 pM, about 15 pM to about 450 pM, about 15 pM to about 400 pM, about 15 pM to about 350 pM, about 15 pM to about 300 pM, about 15 pM to about 250 pM, about 15 pM to about 200 pM, about 15 pM to about 150 pM, about 15 pM to about 100 pM, about 15 pM to about 90 pM, about 15 pM to about 80 pM, about 15 pM to about 70 pM, about 15 pM to about 60 pM, about 15 pM to about 50 pM, about 15 pM to about 40 pM, about 15 pM to about 30 pM, about 15 pM to about 20 pM, about 20 pM to about 5 pM, about 20 pM to about 2 μM, about 20 pM to about 1 μM, about 20 pM to about 500 nM, about 20 pM to about 250 nM, about 20 pM to about 240 nM, about 20 pM to about 230 nM, about 20 pM to about 220 nM, about 20 pM to about 210 nM, about 20 pM to about 200 nM, about 20 pM to about 190 nM, about 20 pM to about 180 nM, about 20 pM to about 170 nM, about 20 pM to about 160 nM, about 20 pM to about 150 nM, about 20 pM to about 140 nM, about 20 pM to about 130 nM, about 20 pM to about 120 nM, about 20 pM to about 110 nM, about 20 pM to about 100 nM, about 20 pM to about 95 nM, about 20 pM to about 90 nM, about 20 pM to about 85 nM, about 20 pM to about 80 nM, about 20 pM to about 75 nM, about 20 pM to about 70 nM, about 20 pM to about 65 nM, about 20 pM to about 60 nM, about 20 pM to about 55 nM, about 20 pM to about 50 nM, about 20 pM to about 45 nM, about 20 pM to about 40 nM, about 20 pM to about 35 nM, about 20 pM to about 30 nM, about 20 pM to about 25 nM, about 20 pM to about 20 nM, about 20 pM to about 15 nM, about 20 pM to about 10 nM, about 20 pM to about 5 nM, about 20 pM to about 2 nM, about 20 pM to about 1 nM, about 20 pM to about 950 pM, about 20 pM to about 900 pM, about 20 pM to about 850 pM, about 20 pM to about 800 pM, about 20 pM to about 750 pM, about 20 pM to about 700 pM, about 20 pM to about 650 pM, about 20 pM to about 600 pM, about 20 pM to about 550 pM, about 20 pM to about 500 pM, about 20 pM to about 450 pM, about 20 pM to about 400 pM, about 20 pM to about 350 pM, about 20 pM to about 300 pM, about 20 pM to about 250 pM, about 20 pM to about 20 pM, about 200 pM to about 150 pM, about 20 pM to about 100 pM, about 20 pM to about 90 pM, about 20 pM to about 80 pM, about 20 pM to about 70 pM, about 20 pM to about 60 pM, about 20 pM to about 50 pM, about 20 pM to about 40 pM, about 20 pM to about 30 pM, about 30 pM to about 5 μM, about 30 pM to about 2 μM, about 30 pM to about 1 μM, about 30 pM to about 500 nM, about 30 pM to about 250 nM, about 30 pM to about 240 nM, about 30 pM to about 230 nM, about 30 pM to about 220 nM, about 30 pM to about 210 nM, about 30 pM to about 200 nM, about 30 pM to about 190 nM, about 30 pM to about 180 nM, about 30 pM to about 170 nM, about 30 pM to about 160 nM, about 30 pM to about 150 nM, about 30 pM to about 140 nM, about 30 pM to about 130 nM, about 30 pM to about 120 nM, about 30 pM to about 110 nM, about 30 pM to about 100 nM, about 30 pM to about 95 nM, about 30 pM to about 90 nM, about 30 pM to about 85 nM, about 30 pM to about 80 nM, about 30 pM to about 75 nM, about 30 pM to about 70 nM, about 30 pM to about 65 nM, about 30 pM to about 60 nM, about 30 pM to about 55 nM, about 30 pM to about 50 nM, about 30 pM to about 45 nM, about 30 pM to about 40 nM, about 30 pM to about 35 nM, about 30 pM to about 30 nM, about 30 pM to about 25 nM, about 30 pM to about 20 nM, about 30 pM to about 15 nM, about 30 pM to about 10 nM, about 30 pM to about 5 nM, about 30 pM to about 2 nM, about 30 pM to about 1 nM, about 30 pM to about 950 pM, about 30 pM to about 900 pM, about 30 pM to about 850 pM, about 30 pM to about 800 pM, about 30 pM to about 750 pM, about 30 pM to about 700 pM, about 30 pM to about 650 pM, about 30 pM to about 600 pM, about 30 pM to about 550 pM, about 30 pM to about 500 pM, about 30 pM to about 450 pM, about 30 pM to about 400 pM, about 30 pM to about 350 pM, about 30 pM to about 300 pM, about 30 pM to about 250 pM, about 30 pM to about 200 pM, about 30 pM to about 150 pM, about 30 pM to about 100 pM, about 30 pM to about 90 pM, about 30 pM to about 80 pM, about 30 pM to about 70 pM, about 30 pM to about 60 pM, about 30 pM to about 50 pM, about 30 pM to about 40 pM, about 40 pM to about 5 μM, about 40 pM to about 2 μM, about 40 pM to about 1 μM, about 40 pM to about 500 nM, about 40 pM to about 250 nM, about 40 pM to about 240 nM, about 40 pM to about 230 nM, about 40 pM to about 220 nM, about 40 pM to about 210 nM, about 40 pM to about 200 nM, about 40 pM to about 190 nM, about 40 pM to about 180 nM, about 40 pM to about 170 nM, about 40 pM to about 160 nM, about 40 pM to about 150 nM, about 40 pM to about 140 nM, about 40 pM to about 130 nM, about 40 pM to about 120 nM, about 40 pM to about 110 nM, about 40 pM to about 100 nM, about 40 pM to about 95 nM, about 40 pM to about 90 nM, about 40 pM to about 85 nM, about 40 pM to about 80 nM, about 40 pM to about 75 nM, about 40 pM to about 70 nM, about 40 pM to about 65 nM, about 40 pM to about 60 nM, about 40 pM to about 55 nM, about 40 pM to about 50 nM, about 40 pM to about 45 nM, about 40 pM to about 40 nM, about 40 pM to about 35 nM, about 40 pM to about 30 nM, about 40 pM to about 25 nM, about 40 pM to about 30 nM, about 40 pM to about 15 nM, about 40 pM to about 10 nM, about 40 pM to about 5 nM, about 40 pM to about 2 nM, about 40 pM to about 1 nM, about 40 pM to about 950 pM, about 40 pM to about 900 pM, about 40 pM to about 850 pM, about 40 pM to about 800 pM, about 40 pM to about 750 pM, about 40 pM to about 700 pM, about 40 pM to about 650 pM, about 40 pM to about 600 pM, about 40 pM to about 550 pM, about 40 pM to about 500 pM, about 40 pM to about 450 pM, about 40 pM to about 400 pM, about 40 pM to about 350 pM, about 40 pM to about 300 pM, about 40 pM to about 250 pM, about 40 pM to about 200 pM, about 40 pM to about 150 pM, about 40 pM to about 100 pM, about 40 pM to about 90 pM, about 40 pM to about 80 pM, about 40 pM to about 70 pM, about 40 pM to about 60 pM, about 40 pM to about 50 pM, about 50 pM to about 5 μM, about 50 pM to about 2 μM, about 50 pM to about 1 μM, about 50 pM to about 500 nM, about 50 pM to about 250 nM, about 50 pM to about 240 nM, about 50 pM to about 230 nM, about 50 pM to about 220 nM, about 50 pM to about 210 nM, about 50 pM to about 200 nM, about 50 pM to about 190 nM, about 50 pM to about 180 nM, about 50 pM to about 170 nM, about 50 pM to about 160 nM, about 50 pM to about 150 nM, about 50 pM to about 140 nM, about 50 pM to about 130 nM, about 50 pM to about 120 nM, about 50 pM to about 110 nM, about 50 pM to about 100 nM, about 50 pM to about 95 nM, about 50 pM to about 90 nM, about 50 pM to about 85 nM, about 50 pM to about 80 nM, about 50 pM to about 75 nM, about 50 pM to about 70 nM, about 50 pM to about 65 nM, about 50 pM to about 60 nM, about 50 pM to about 55 nM, about 50 pM to about 50 nM, about 50 pM to about 45 nM, about 50 pM to about 40 nM, about 50 pM to about 35 nM, about 50 pM to about 30 nM, about 50 pM to about 25 nM, about 50 pM to about 30 nM, about 50 pM to about 15 nM, about 50 pM to about 10 nM, about 50 pM to about 5 nM, about 50 pM to about 2 nM, about 50 pM to about 1 nM, about 50 pM to about 950 pM, about 50 pM to about 900 pM, about 50 pM to about 850 pM, about 50 pM to about 800 pM, about 50 pM to about 750 pM, about 50 pM to about 700 pM, about 50 pM to about 650 pM, about 50 pM to about 600 pM, about 50 pM to about 550 pM, about 50 pM to about 500 pM, about 50 pM to about 450 pM, about 50 pM to about 400 pM, about 50 pM to about 350 pM, about 50 pM to about 300 pM, about 50 pM to about 250 pM, about 50 pM to about 200 pM, about 50 pM to about 150 pM, about 50 pM to about 100 pM, about 50 pM to about 90 pM, about 50 pM to about 80 pM, about 50 pM to about 70 pM, about 50 pM to about 60 pM, about 60 pM to about 5 μM, about 60 pM to about 2 μM, about 60 pM to about 1 μM, about 60 pM to about 500 nM, about 60 pM to about 250 nM, about 60 pM to about 240 nM, about 60 pM to about 230 nM, about 60 pM to about 220 nM, about 60 pM to about 210 nM, about 60 pM to about 200 nM, about 60 pM to about 190 nM, about 60 pM to about 180 nM, about 60 pM to about 170 nM, about 60 pM to about 160 nM, about 60 pM to about 150 nM, about 60 pM to about 140 nM, about 60 pM to about 130 nM, about 60 pM to about 120 nM, about 60 pM to about 110 nM, about 60 pM to about 100 nM, about 60 pM to about 95 nM, about 60 pM to about 90 nM, about 60 pM to about 85 nM, about 60 pM to about 80 nM, about 60 pM to about 75 nM, about 60 pM to about 70 nM, about 60 pM to about 65 nM, about 60 pM to about 60 nM, about 60 pM to about 55 nM, about 60 pM to about 50 nM, about 60 pM to about 45 nM, about 60 pM to about 40 nM, about 60 pM to about 35 nM, about 60 pM to about 30 nM, about 60 pM to about 25 nM, about 60 pM to about 20 nM, about 60 pM to about 15 nM, about 60 pM to about 10 nM, about 60 pM to about 5 nM, about 60 pM to about 2 nM, about 60 pM to about 1 nM, about 60 pM to about 950 pM, about 60 pM to about 900 pM, about 60 pM to about 850 pM, about 60 pM to about 800 pM, about 60 pM to about 750 pM, about 60 pM to about 700 pM, about 60 pM to about 650 pM, about 60 pM to about 600 pM, about 60 pM to about 550 pM, about 60 pM to about 500 pM, about 60 pM to about 450 pM, about 60 pM to about 400 pM, about 60 pM to about 350 pM, about 60 pM to about 300 pM, about 60 pM to about 250 pM, about 60 pM to about 200 pM, about 60 pM to about 150 pM, about 60 pM to about 100 pM, about 60 pM to about 90 pM, about 60 pM to about 80 pM, about 60 pM to about 70 pM, about 70 pM to about 5 μM, about 70 pM to about 2 μM, about 70 pM to about 1 μM, about 70 pM to about 500 nM, about 70 pM to about 250 nM, about 70 pM to about 240 nM, about 70 pM to about 230 nM, about 70 pM to about 220 nM, about 70 pM to about 210 nM, about 70 pM to about 200 nM, about 70 pM to about 190 nM, about 70 pM to about 180 nM, about 70 pM to about 170 nM, about 70 pM to about 160 nM, about 70 pM to about 150 nM, about 70 pM to about 140 nM, about 70 pM to about 130 nM, about 70 pM to about 120 nM, about 70 pM to about 110 nM, about 70 pM to about 100 nM, about 70 pM to about 95 nM, about 70 pM to about 90 nM, about 70 pM to about 85 nM, about 70 pM to about 80 nM, about 70 pM to about 75 nM, about 70 pM to about 70 nM, about 70 pM to about 65 nM, about 70 pM to about 60 nM, about 70 pM to about 55 nM, about 70 pM to about 50 nM, about 70 pM to about 45 nM, about 70 pM to about 40 nM, about 70 pM to about 35 nM, about 70 pM to about 30 nM, about 70 pM to about 25 nM, about 70 pM to about 20 nM, about 70 pM to about 15 nM, about 70 pM to about 10 nM, about 70 pM to about 5 nM, about 70 pM to about 2 nM, about 70 pM to about 1 nM, about 70 pM to about 950 pM, about 70 pM to about 900 pM, about 70 pM to about 850 pM, about 70 pM to about 800 pM, about 70 pM to about 750 pM, about 70 pM to about 700 pM, about 70 pM to about 650 pM, about 70 pM to about 600 pM, about 70 pM to about 550 pM, about 70 pM to about 500 pM, about 70 pM to about 450 pM, about 70 pM to about 400 pM, about 70 pM to about 350 pM, about 70 pM to about 300 pM, about 70 pM to about 250 pM, about 70 pM to about 200 pM, about 70 pM to about 150 pM, about 70 pM to about 100 pM, about 70 pM to about 90 pM, about 70 pM to about 80 pM, about 80 pM to about 5 μM, about 80 pM to about 2 μM, about 80 pM to about 1 μM, about 80 pM to about 500 nM, about 80 pM to about 250 nM, about 80 pM to about 240 nM, about 80 pM to about 230 nM, about 80 pM to about 220 nM, about 80 pM to about 210 nM, about 80 pM to about 200 nM, about 80 pM to about 190 nM, about 80 pM to about 180 nM, about 80 pM to about 170 nM, about 80 pM to about 160 nM, about 80 pM to about 150 nM, about 80 pM to about 140 nM, about 80 pM to about 130 nM, about 80 pM to about 120 nM, about 80 pM to about 110 nM, about 80 pM to about 100 nM, about 80 pM to about 95 nM, about 80 pM to about 90 nM, about 80 pM to about 85 nM, about 80 pM to about 80 nM, about 80 pM to about 75 nM, about 80 pM to about 70 nM, about 80 pM to about 65 nM, about 80 pM to about 60 nM, about 80 pM to about 55 nM, about 80 pM to about 50 nM, about 80 pM to about 45 nM, about 80 pM to about 40 nM, about 80 pM to about 35 nM, about 80 pM to about 30 nM, about 80 pM to about 25 nM, about 80 pM to about 20 nM, about 80 pM to about 15 nM, about 80 pM to about 10 nM, about 80 pM to about 5 nM, about 80 pM to about 2 nM, about 80 pM to about 1 nM, about 80 pM to about 950 pM, about 80 pM to about 900 pM, about 80 pM to about 850 pM, about 80 pM to about 800 pM, about 80 pM to about 750 pM, about 80 pM to about 700 pM, about 80 pM to about 650 pM, about 80 pM to about 600 pM, about 80 pM to about 550 pM, about 80 pM to about 500 pM, about 80 pM to about 450 pM, about 80 pM to about 400 pM, about 80 pM to about 350 pM, about 80 pM to about 300 pM, about 80 pM to about 250 pM, about 80 pM to about 200 pM, about 80 pM to about 150 pM, about 80 pM to about 100 pM, about 80 pM to about 90 pM, about 90 pM to about 5 μM, about 90 pM to about 2 μM, about 90 pM to about 1 μM, about 90 pM to about 500 nM, about 90 pM to about 250 nM, about 90 pM to about 240 nM, about 90 pM to about 230 nM, about 90 pM to about 220 nM, about 90 pM to about 210 nM, about 90 pM to about 200 nM, about 90 pM to about 190 nM, about 90 pM to about 180 nM, about 90 pM to about 170 nM, about 90 pM to about 160 nM, about 90 pM to about 150 nM, about 90 pM to about 140 nM, about 90 pM to about 130 nM, about 90 pM to about 120 nM, about 90 pM to about 110 nM, about 90 pM to about 100 nM, about 90 pM to about 95 nM, about 90 pM to about 90 nM, about 90 pM to about 85 nM, about 90 pM to about 80 nM, about 90 pM to about 75 nM, about 90 pM to about 70 nM, about 90 pM to about 65 nM, about 90 pM to about 60 nM, about 90 pM to about 55 nM, about 90 pM to about 50 nM, about 90 pM to about 45 nM, about 90 pM to about 40 nM, about 90 pM to about 35 nM, about 90 pM to about 30 nM, about 90 pM to about 25 nM, about 90 pM to about 30 nM, about 90 pM to about 15 nM, about 90 pM to about 10 nM, about 90 pM to about 5 nM, about 90 pM to about 2 nM, about 90 pM to about 1 nM, about 90 pM to about 950 pM, about 90 pM to about 900 pM, about 90 pM to about 850 pM, about 90 pM to about 800 pM, about 90 pM to about 750 pM, about 90 pM to about 700 pM, about 90 pM to about 650 pM, about 90 pM to about 600 pM, about 90 pM to about 550 pM, about 90 pM to about 500 pM, about 90 pM to about 450 pM, about 90 pM to about 400 pM, about 90 pM to about 350 pM, about 90 pM to about 300 pM, about 90 pM to about 250 pM, about 90 pM to about 200 pM, about 90 pM to about 150 pM, about 90 pM to about 100 pM, about 100 pM to about 30 nM, about 100 pM to about 25 nM, about 100 pM to about 5 μM, about 100 pM to about 2 μM, about 100 pM to about 1 μM, about 100 pM to about 500 nM, about 100 pM to about 250 nM, about 100 pM to about 240 nM, about 100 pM to about 230 nM, about 100 pM to about 220 nM, about 100 pM to about 210 nM, about 100 pM to about 200 nM, about 100 pM to about 190 nM, about 100 pM to about 180 nM, about 100 pM to about 170 nM, about 100 pM to about 160 nM, about 100 pM to about 150 nM, about 100 pM to about 140 nM, about 100 pM to about 130 nM, about 100 pM to about 120 nM, about 100 pM to about 110 nM, about 100 pM to about 100 nM, about 100 pM to about 95 nM, about 100 pM to about 90 nM, about 100 pM to about 85 nM, about 100 pM to about 80 nM, about 100 pM to about 75 nM, about 100 pM to about 70 nM, about 100 pM to about 65 nM, about 100 pM to about 60 nM, about 100 pM to about 55 nM, about 100 pM to about 50 nM, about 100 pM to about 45 nM, about 100 pM to about 40 nM, about 100 pM to about 35 nM, about 100 pM to about 30 nM, about 100 pM to about 15 nM, about 100 pM to about 10 nM, about 100 pM to about 5 nM, about 100 pM to about 2 nM, about 100 pM to about 1 nM, about 100 pM to about 950 pM, about 100 pM to about 900 pM, about 100 pM to about 850 pM, about 100 pM to about 800 pM, about 100 pM to about 750 pM, about 100 pM to about 700 pM, about 100 pM to about 650 pM, about 100 pM to about 600 pM, about 100 pM to about 550 pM, about 100 pM to about 500 pM, about 100 pM to about 450 pM, about 100 pM to about 400 pM, about 100 pM to about 350 pM, about 100 pM to about 300 pM, about 100 pM to about 250 pM, about 100 pM to about 200 pM, about 100 pM to about 150 pM, about 150 pM to about 5 μM, about 150 pM to about 2 μM, about 150 pM to about 1 μM, about 150 pM to about 500 nM, about 150 pM to about 250 nM, about 150 pM to about 240 nM, about 150 pM to about 230 nM, about 150 pM to about 220 nM, about 150 pM to about 210 nM, about 150 pM to about 200 nM, about 150 pM to about 190 nM, about 150 pM to about 180 nM, about 150 pM to about 170 nM, about 150 pM to about 160 nM, about 150 pM to about 150 nM, about 150 pM to about 140 nM, about 150 pM to about 130 nM, about 150 pM to about 120 nM, about 150 pM to about 110 nM, about 150 pM to about 100 nM, about 150 pM to about 95 nM, about 150 pM to about 90 nM, about 150 pM to about 85 nM, about 150 pM to about 80 nM, about 150 pM to about 75 nM, about 150 pM to about 70 nM, about 150 pM to about 65 nM, about 150 pM to about 60 nM, about 150 pM to about 55 nM, about 150 pM to about 50 nM, about 150 pM to about 45 nM, about 150 pM to about 40 nM, about 150 pM to about 35 nM, about 150 pM to about 30 nM, about 150 pM to about 25 nM, about 150 pM to about 30 nM, about 150 pM to about 15 nM, about 150 pM to about 10 nM, about 150 pM to about 5 nM, about 150 pM to about 2 nM, about 150 pM to about 1 nM, about 150 pM to about 950 pM, about 150 pM to about 900 pM, about 150 pM to about 850 pM, about 150 pM to about 800 pM, about 150 pM to about 750 pM, about 150 pM to about 700 pM, about 150 pM to about 650 pM, about 150 pM to about 600 pM, about 150 pM to about 550 pM, about 150 pM to about 500 pM, about 150 pM to about 450 pM, about 150 pM to about 400 pM, about 150 pM to about 350 pM, about 150 pM to about 300 pM, about 150 pM to about 250 pM, about 150 pM to about 200 pM, about 200 pM to about 5 μM, about 200 pM to about 2 μM, about 200 pM to about 1 μM, about 200 pM to about 500 nM, about 200 pM to about 250 nM, about 200 pM to about 240 nM, about 200 pM to about 230 nM, about 200 pM to about 220 nM, about 200 pM to about 210 nM, about 200 pM to about 200 nM, about 200 pM to about 190 nM, about 200 pM to about 180 nM, about 200 pM to about 170 nM, about 200 pM to about 160 nM, about 200 pM to about 150 nM, about 200 pM to about 140 nM, about 200 pM to about 130 nM, about 200 pM to about 120 nM, about 200 pM to about 110 nM, about 200 pM to about 100 nM, about 200 pM to about 95 nM, about 200 pM to about 90 nM, about 200 pM to about 85 nM, about 200 pM to about 80 nM, about 200 pM to about 75 nM, about 200 pM to about 70 nM, about 200 pM to about 65 nM, about 200 pM to about 60 nM, about 200 pM to about 55 nM, about 200 pM to about 50 nM, about 200 pM to about 45 nM, about 200 pM to about 40 nM, about 200 pM to about 35 nM, about 200 pM to about 30 nM, about 200 pM to about 25 nM, about 200 pM to about 30 nM, about 200 pM to about 15 nM, about 200 pM to about 10 nM, about 200 pM to about 5 nM, about 200 pM to about 2 nM, about 200 pM to about 1 nM, about 200 pM to about 950 pM, about 200 pM to about 900 pM, about 200 pM to about 850 pM, about 200 pM to about 800 pM, about 200 pM to about 750 pM, about 200 pM to about 700 pM, about 200 pM to about 650 pM, about 200 pM to about 600 pM, about 200 pM to about 550 pM, about 200 pM to about 500 pM, about 200 pM to about 450 pM, about 200 pM to about 400 pM, about 200 pM to about 350 pM, about 200 pM to about 300 pM, about 200 pM to about 250 pM, about 300 pM to about 30 nM, about 300 pM to about 25 nM, about 300 pM to about 5 μM, about 300 pM to about 2 μM, about 300 pM to about 1 μM, about 300 pM to about 500 nM, about 300 pM to about 250 nM, about 300 pM to about 240 nM, about 300 pM to about 230 nM, about 300 pM to about 220 nM, about 300 pM to about 210 nM, about 300 pM to about 200 nM, about 300 pM to about 190 nM, about 300 pM to about 180 nM, about 300 pM to about 170 nM, about 300 pM to about 160 nM, about 300 pM to about 150 nM, about 300 pM to about 140 nM, about 300 pM to about 130 nM, about 300 pM to about 120 nM, about 300 pM to about 110 nM, about 300 pM to about 100 nM, about 300 pM to about 95 nM, about 300 pM to about 90 nM, about 300 pM to about 85 nM, about 300 pM to about 80 nM, about 300 pM to about 75 nM, about 300 pM to about 70 nM, about 300 pM to about 65 nM, about 300 pM to about 60 nM, about 300 pM to about 55 nM, about 300 pM to about 50 nM, about 300 pM to about 45 nM, about 300 pM to about 40 nM, about 300 pM to about 35 nM, about 300 pM to about 30 nM, about 300 pM to about 15 nM, about 300 pM to about 10 nM, about 300 pM to about 5 nM, about 300 pM to about 2 nM, about 300 pM to about 1 nM, about 300 pM to about 950 pM, about 300 pM to about 900 pM, about 300 pM to about 850 pM, about 300 pM to about 800 pM, about 300 pM to about 750 pM, about 300 pM to about 700 pM, about 300 pM to about 650 pM, about 300 pM to about 600 pM, about 300 pM to about 550 pM, about 300 pM to about 500 pM, about 300 pM to about 450 pM, about 300 pM to about 400 pM, about 300 pM to about 350 pM, about 400 pM to about 5 μM, about 400 pM to about 2 μM, about 400 pM to about 1 μM, about 400 pM to about 500 nM, about 400 pM to about 250 nM, about 400 pM to about 240 nM, about 400 pM to about 230 nM, about 400 pM to about 220 nM, about 400 pM to about 210 nM, about 400 pM to about 200 nM, about 400 pM to about 190 nM, about 400 pM to about 180 nM, about 400 pM to about 170 nM, about 400 pM to about 160 nM, about 400 pM to about 150 nM, about 400 pM to about 140 nM, about 400 pM to about 130 nM, about 400 pM to about 120 nM, about 400 pM to about 110 nM, about 400 pM to about 100 nM, about 400 pM to about 95 nM, about 400 pM to about 90 nM, about 400 pM to about 85 nM, about 400 pM to about 80 nM, about 400 pM to about 75 nM, about 400 pM to about 70 nM, about 400 pM to about 65 nM, about 400 pM to about 60 nM, about 400 pM to about 55 nM, about 400 pM to about 50 nM, about 400 pM to about 45 nM, about 400 pM to about 40 nM, about 400 pM to about 35 nM, about 400 pM to about 30 nM, about 400 pM to about 25 nM, about 400 pM to about 20 nM, about 400 pM to about 15 nM, about 400 pM to about 10 nM, about 400 pM to about 5 nM, about 400 pM to about 2 nM, about 400 pM to about 1 nM, about 400 pM to about 950 pM, about 400 pM to about 900 pM, about 400 pM to about 850 pM, about 400 pM to about 800 pM, about 400 pM to about 750 pM, about 400 pM to about 700 pM, about 400 pM to about 650 pM, about 400 pM to about 600 pM, about 400 pM to about 550 pM, about 400 pM to about 500 pM, about 500 pM to about 5 μM, about 500 pM to about 2 μM, about 500 pM to about 1 μM, about 500 pM to about 500 nM, about 500 pM to about 250 nM, about 500 pM to about 240 nM, about 500 pM to about 230 nM, about 500 pM to about 220 nM, about 500 pM to about 210 nM, about 500 pM to about 200 nM, about 500 pM to about 190 nM, about 500 pM to about 180 nM, about 500 pM to about 170 nM, about 500 pM to about 160 nM, about 500 pM to about 150 nM, about 500 pM to about 140 nM, about 500 pM to about 130 nM, about 500 pM to about 120 nM, about 500 pM to about 110 nM, about 500 pM to about 100 nM, about 500 pM to about 95 nM, about 500 pM to about 90 nM, about 500 pM to about 85 nM, about 500 pM to about 80 nM, about 500 pM to about 75 nM, about 500 pM to about 70 nM, about 500 pM to about 65 nM, about 500 pM to about 60 nM, about 500 pM to about 55 nM, about 500 pM to about 50 nM, about 500 pM to about 45 nM, about 500 pM to about 40 nM, about 500 pM to about 35 nM, about 500 pM to about 30 nM, about 500 pM to about 25 nM, about 500 pM to about 20 nM, about 500 pM to about 15 nM, about 500 pM to about 10 nM, about 500 pM to about 5 nM, about 500 pM to about 2 nM, about 500 pM to about 1 nM, about 500 pM to about 950 pM, about 500 pM to about 900 pM, about 500 pM to about 850 pM, about 500 pM to about 800 pM, about 500 pM to about 750 pM, about 500 pM to about 700 pM, about 500 pM to about 650 pM, about 500 pM to about 600 pM, about 500 pM to about 550 pM, about 600 pM to about 5 μM, about 600 pM to about 2 μM, about 600 pM to about 1 μM, about 600 pM to about 500 nM, about 600 pM to about 250 nM, about 600 pM to about 240 nM, about 600 pM to about 230 nM, about 600 pM to about 220 nM, about 600 pM to about 210 nM, about 600 pM to about 200 nM, about 600 pM to about 190 nM, about 600 pM to about 180 nM, about 600 pM to about 170 nM, about 600 pM to about 160 nM, about 600 pM to about 150 nM, about 600 pM to about 140 nM, about 600 pM to about 130 nM, about 600 pM to about 120 nM, about 600 pM to about 110 nM, about 600 pM to about 100 nM, about 600 pM to about 95 nM, about 600 pM to about 90 nM, about 600 pM to about 85 nM, about 600 pM to about 80 nM, about 600 pM to about 75 nM, about 600 pM to about 70 nM, about 600 pM to about 65 nM, about 600 pM to about 60 nM, about 600 pM to about 55 nM, about 600 pM to about 50 nM, about 600 pM to about 45 nM, about 600 pM to about 40 nM, about 600 pM to about 35 nM, about 600 pM to about 30 nM, about 600 pM to about 25 nM, about 600 pM to about 20 nM, about 600 pM to about 15 nM, about 600 pM to about 10 nM, about 600 pM to about 5 nM, about 600 pM to about 2 nM, about 600 pM to about 1 nM, about 600 pM to about 950 pM, about 600 pM to about 900 pM, about 600 pM to about 850 pM, about 600 pM to about 800 pM, about 600 pM to about 750 pM, about 600 pM to about 700 pM, about 600 pM to about 650 pM, about 700 pM to about 5 μM, about 700 pM to about 2 μM, about 700 pM to about 1 μM, about 700 pM to about 500 nM, about 700 pM to about 250 nM, about 700 pM to about 240 nM, about 700 pM to about 230 nM, about 700 pM to about 220 nM, about 700 pM to about 210 nM, about 700 pM to about 200 nM, about 700 pM to about 190 nM, about 700 pM to about 180 nM, about 700 pM to about 170 nM, about 700 pM to about 160 nM, about 700 pM to about 150 nM, about 700 pM to about 140 nM, about 700 pM to about 130 nM, about 700 pM to about 120 nM, about 700 pM to about 110 nM, about 700 pM to about 100 nM, about 700 pM to about 95 nM, about 700 pM to about 90 nM, about 700 pM to about 85 nM, about 700 pM to about 80 nM, about 700 pM to about 75 nM, about 700 pM to about 70 nM, about 700 pM to about 65 nM, about 700 pM to about 60 nM, about 700 pM to about 55 nM, about 700 pM to about 50 nM, about 700 pM to about 45 nM, about 700 pM to about 40 nM, about 700 pM to about 35 nM, about 700 pM to about 30 nM, about 700 pM to about 25 nM, about 700 pM to about 20 nM, about 700 pM to about 15 nM, about 700 pM to about 10 nM, about 700 pM to about 5 nM, about 700 pM to about 2 nM, about 700 pM to about 1 nM, about 700 pM to about 950 pM, about 700 pM to about 900 pM, about 700 pM to about 850 pM, about 700 pM to about 800 pM, about 700 pM to about 750 pM, about 800 pM to about 5 μM, about 800 pM to about 2 μM, about 800 pM to about 1 μM, about 800 pM to about 500 nM, about 800 pM to about 250 nM, about 800 pM to about 240 nM, about 800 pM to about 230 nM, about 800 pM to about 220 nM, about 800 pM to about 210 nM, about 800 pM to about 200 nM, about 800 pM to about 190 nM, about 800 pM to about 180 nM, about 800 pM to about 170 nM, about 800 pM to about 160 nM, about 800 pM to about 150 nM, about 800 pM to about 140 nM, about 800 pM to about 130 nM, about 800 pM to about 120 nM, about 800 pM to about 110 nM, about 800 pM to about 100 nM, about 800 pM to about 95 nM, about 800 pM to about 90 nM, about 800 pM to about 85 nM, about 800 pM to about 80 nM, about 800 pM to about 75 nM, about 800 pM to about 70 nM, about 800 pM to about 65 nM, about 800 pM to about 60 nM, about 800 pM to about 55 nM, about 800 pM to about 50 nM, about 800 pM to about 45 nM, about 800 pM to about 40 nM, about 800 pM to about 35 nM, about 800 pM to about 30 nM, about 800 pM to about 25 nM, about 800 pM to about 20 nM, about 800 pM to about 15 nM, about 800 pM to about 10 nM, about 800 pM to about 5 nM, about 800 pM to about 2 nM, about 800 pM to about 1 nM, about 800 pM to about 950 pM, about 800 pM to about 900 pM, about 800 pM to about 850 pM, about 900 pM to about 5 μM, about 900 pM to about 2 μM, about 900 pM to about 1 μM, about 900 pM to about 500 nM, about 900 pM to about 250 nM, about 900 pM to about 240 nM, about 900 pM to about 230 nM, about 900 pM to about 220 nM, about 900 pM to about 210 nM, about 900 pM to about 200 nM, about 900 pM to about 190 nM, about 900 pM to about 180 nM, about 900 pM to about 170 nM, about 900 pM to about 160 nM, about 900 pM to about 150 nM, about 900 pM to about 140 nM, about 900 pM to about 130 nM, about 900 pM to about 120 nM, about 900 pM to about 110 nM, about 900 pM to about 100 nM, about 900 pM to about 95 nM, about 900 pM to about 90 nM, about 900 pM to about 85 nM, about 900 pM to about 80 nM, about 900 pM to about 75 nM, about 900 pM to about 70 nM, about 900 pM to about 65 nM, about 900 pM to about 60 nM, about 900 pM to about 55 nM, about 900 pM to about 50 nM, about 900 pM to about 45 nM, about 900 pM to about 40 nM, about 900 pM to about 35 nM, about 900 pM to about 30 nM, about 900 pM to about 25 nM, about 900 pM to about 20 nM, about 900 pM to about 15 nM, about 900 pM to about 10 nM, about 900 pM to about 5 nM, about 900 pM to about 2 nM, about 900 pM to about 1 nM, about 900 pM to about 950 pM, about 1 nM to about 5 μM, about 1 nM to about 2 μM, about 1 nM to about 1 μM, about 1 nM to about 500 nM, about 1 nM to about 250 nM, about 1 nM to about 240 nM, about 1 nM to about 230 nM, about 1 nM to about 220 nM, about 1 nM to about 210 nM, about 1 nM to about 200 nM, about 1 nM to about 190 nM, about 1 nM to about 180 nM, about 1 nM to about 170 nM, about 1 nM to about 160 nM, about 1 nM to about 150 nM, about 1 nM to about 140 nM, about 1 nM to about 130 nM, about 1 nM to about 120 nM, about 1 nM to about 110 nM, about 1 nM to about 100 nM, about 1 nM to about 95 nM, about 1 nM to about 90 nM, about 1 nM to about 85 nM, about 1 nM to about 80 nM, about 1 nM to about 75 nM, about 1 nM to about 70 nM, about 1 nM to about 65 nM, about 1 nM to about 60 nM, about 1 nM to about 55 nM, about 1 nM to about 50 nM, about 1 nM to about 45 nM, about 1 nM to about 40 nM, about 1 nM to about 35 nM, about 1 nM to about 30 nM, about 1 nM to about 25 nM, about 1 nM to about 20 nM, about 1 nM to about 15 nM, about 1 nM to about 10 nM, about 1 nM to about 5 nM, about 2 nM to about 5 μM, about 2 nM to about 2 μM, about 2 nM to about 1 μM, about 2 nM to about 500 nM, about 2 nM to about 250 nM, about 2 nM to about 240 nM, about 2 nM to about 230 nM, about 2 nM to about 220 nM, about 2 nM to about 210 nM, about 2 nM to about 200 nM, about 2 nM to about 190 nM, about 2 nM to about 180 nM, about 2 nM to about 170 nM, about 2 nM to about 160 nM, about 2 nM to about 150 nM, about 2 nM to about 140 nM, about 2 nM to about 130 nM, about 2 nM to about 120 nM, about 2 nM to about 110 nM, about 2 nM to about 100 nM, about 2 nM to about 95 nM, about 2 nM to about 90 nM, about 2 nM to about 85 nM, about 2 nM to about 80 nM, about 2 nM to about 75 nM, about 2 nM to about 70 nM, about 2 nM to about 65 nM, about 2 nM to about 60 nM, about 2 nM to about 55 nM, about 2 nM to about 50 nM, about 2 nM to about 45 nM, about 2 nM to about 40 nM, about 2 nM to about 35 nM, about 2 nM to about 30 nM, about 2 nM to about 25 nM, about 2 nM to about 20 nM, about 2 nM to about 15 nM, about 2 nM to about 10 nM, about 2 nM to about 5 nM, about 4 nM to about 5 μM, about 4 nM to about 2 μM, about 4 nM to about 1 μM, about 4 nM to about 500 nM, about 4 nM to about 250 nM, about 4 nM to about 240 nM, about 4 nM to about 230 nM, about 4 nM to about 220 nM, about 4 nM to about 210 nM, about 4 nM to about 200 nM, about 4 nM to about 190 nM, about 4 nM to about 180 nM, about 4 nM to about 170 nM, about 4 nM to about 160 nM, about 4 nM to about 150 nM, about 4 nM to about 140 nM, about 4 nM to about 130 nM, about 4 nM to about 120 nM, about 4 nM to about 110 nM, about 4 nM to about 100 nM, about 4 nM to about 95 nM, about 4 nM to about 90 nM, about 4 nM to about 85 nM, about 4 nM to about 80 nM, about 4 nM to about 75 nM, about 4 nM to about 70 nM, about 4 nM to about 65 nM, about 4 nM to about 60 nM, about 4 nM to about 55 nM, about 4 nM to about 50 nM, about 4 nM to about 45 nM, about 4 nM to about 40 nM, about 4 nM to about 35 nM, about 4 nM to about 30 nM, about 4 nM to about 25 nM, about 4 nM to about 20 nM, about 4 nM to about 15 nM, about 4 nM to about 10 nM, about 4 nM to about 5 nM, about 5 nM to about 5 μM, about 5 nM to about 2 μM, about 5 nM to about 1 μM, about 5 nM to about 500 nM, about 5 nM to about 250 nM, about 5 nM to about 240 nM, about 5 nM to about 230 nM, about 5 nM to about 220 nM, about 5 nM to about 210 nM, about 5 nM to about 200 nM, about 5 nM to about 190 nM, about 5 nM to about 180 nM, about 5 nM to about 170 nM, about 5 nM to about 160 nM, about 5 nM to about 150 nM, about 5 nM to about 140 nM, about 5 nM to about 130 nM, about 5 nM to about 120 nM, about 5 nM to about 110 nM, about 5 nM to about 100 nM, about 5 nM to about 95 nM, about 5 nM to about 90 nM, about 5 nM to about 85 nM, about 5 nM to about 80 nM, about 5 nM to about 75 nM, about 5 nM to about 70 nM, about 5 nM to about 65 nM, about 5 nM to about 60 nM, about 5 nM to about 55 nM, about 5 nM to about 50 nM, about 5 nM to about 45 nM, about 5 nM to about 40 nM, about 5 nM to about 35 nM, about 5 nM to about 30 nM, about 5 nM to about 25 nM, about 5 nM to about 20 nM, about 5 nM to about 15 nM, about 5 nM to about 10 nM, about 10 nM to about 5 μM, about 10 nM to about 2 μM, about 10 nM to about 1 μM, about 10 nM to about 500 nM, about 10 nM to about 250 nM, about 10 nM to about 240 nM, about 10 nM to about 230 nM, about 10 nM to about 220 nM, about 10 nM to about 210 nM, about 10 nM to about 200 nM, about 10 nM to about 190 nM, about 10 nM to about 180 nM, about 10 nM to about 170 nM, about 10 nM to about 160 nM, about 10 nM to about 150 nM, about 10 nM to about 140 nM, about 10 nM to about 130 nM, about 10 nM to about 120 nM, about 10 nM to about 110 nM, about 10 nM to about 100 nM, about 10 nM to about 95 nM, about 10 nM to about 90 nM, about 10 nM to about 85 nM, about 10 nM to about 80 nM, about 10 nM to about 75 nM, about 10 nM to about 70 nM, about 10 nM to about 65 nM, about 10 nM to about 60 nM, about 10 nM to about 55 nM, about 10 nM to about 50 nM, about 10 nM to about 45 nM, about 10 nM to about 40 nM, about 10 nM to about 35 nM, about 10 nM to about 30 nM, about 10 nM to about 25 nM, about 10 nM to about 20 nM, about 10 nM to about 15 nM, about 15 nM to about 5 μM, about 15 nM to about 2 μM, about 15 nM to about 1 μM, about 15 nM to about 500 nM, about 15 nM to about 250 nM, about 15 nM to about 240 nM, about 15 nM to about 230 nM, about 15 nM to about 220 nM, about 15 nM to about 210 nM, about 15 nM to about 200 nM, about 15 nM to about 190 nM, about 15 nM to about 180 nM, about 15 nM to about 170 nM, about 15 nM to about 160 nM, about 15 nM to about 150 nM, about 15 nM to about 140 nM, about 15 nM to about 130 nM, about 15 nM to about 120 nM, about 15 nM to about 110 nM, about 15 nM to about 100 nM, about 15 nM to about 95 nM, about 15 nM to about 90 nM, about 15 nM to about 85 nM, about 15 nM to about 80 nM, about 15 nM to about 75 nM, about 15 nM to about 70 nM, about 15 nM to about 65 nM, about 15 nM to about 60 nM, about 15 nM to about 55 nM, about 15 nM to about 50 nM, about 15 nM to about 45 nM, about 15 nM to about 40 nM, about 15 nM to about 35 nM, about 15 nM to about 30 nM, about 15 nM to about 25 nM, about 15 nM to about 20 nM, about 20 nM to about 5 μM, about 20 nM to about 2 μM, about 20 nM to about 1 μM, about 20 nM to about 500 nM, about 20 nM to about 250 nM, about 20 nM to about 240 nM, about 20 nM to about 230 nM, about 20 nM to about 220 nM, about 20 nM to about 210 nM, about 20 nM to about 200 nM, about 20 nM to about 190 nM, about 20 nM to about 180 nM, about 20 nM to about 170 nM, about 20 nM to about 160 nM, about 20 nM to about 150 nM, about 20 nM to about 140 nM, about 20 nM to about 130 nM, about 20 nM to about 120 nM, about 20 nM to about 110 nM, about 20 nM to about 100 nM, about 20 nM to about 95 nM, about 20 nM to about 90 nM, about 20 nM to about 85 nM, about 20 nM to about 80 nM, about 20 nM to about 75 nM, about 20 nM to about 70 nM, about 20 nM to about 65 nM, about 20 nM to about 60 nM, about 20 nM to about 55 nM, about 20 nM to about 50 nM, about 20 nM to about 45 nM, about 20 nM to about 40 nM, about 20 nM to about 35 nM, about 20 nM to about 30 nM, about 20 nM to about 25 nM, about 25 nM to about 5 μM, about 25 nM to about 2 μM, about 25 nM to about 1 μM, about 25 nM to about 500 nM, about 25 nM to about 250 nM, about 25 nM to about 240 nM, about 25 nM to about 230 nM, about 25 nM to about 220 nM, about 25 nM to about 210 nM, about 25 nM to about 200 nM, about 25 nM to about 190 nM, about 25 nM to about 180 nM, about 25 nM to about 170 nM, about 25 nM to about 160 nM, about 25 nM to about 150 nM, about 25 nM to about 140 nM, about 25 nM to about 130 nM, about 25 nM to about 120 nM, about 25 nM to about 110 nM, about 25 nM to about 100 nM, about 25 nM to about 95 nM, about 25 nM to about 90 nM, about 25 nM to about 85 nM, about 25 nM to about 80 nM, about 25 nM to about 75 nM, about 25 nM to about 70 nM, about 25 nM to about 65 nM, about 25 nM to about 60 nM, about 25 nM to about 55 nM, about 25 nM to about 50 nM, about 25 nM to about 45 nM, about 25 nM to about 40 nM, about 25 nM to about 35 nM, about 25 nM to about 30 nM, about 30 nM to about 5 μM, about 30 nM to about 2 μM, about 30 nM to about 1 μM, about 30 nM to about 500 nM, about 30 nM to about 250 nM, about 30 nM to about 240 nM, about 30 nM to about 230 nM, about 30 nM to about 220 nM, about 30 nM to about 210 nM, about 30 nM to about 200 nM, about 30 nM to about 190 nM, about 30 nM to about 180 nM, about 30 nM to about 170 nM, about 30 nM to about 160 nM, about 30 nM to about 150 nM, about 30 nM to about 140 nM, about 30 nM to about 130 nM, about 30 nM to about 120 nM, about 30 nM to about 110 nM, about 30 nM to about 100 nM, about 30 nM to about 95 nM, about 30 nM to about 90 nM, about 30 nM to about 85 nM, about 30 nM to about 80 nM, about 30 nM to about 75 nM, about 30 nM to about 70 nM, about 30 nM to about 65 nM, about 30 nM to about 60 nM, about 30 nM to about 55 nM, about 30 nM to about 50 nM, about 30 nM to about 45 nM, about 30 nM to about 40 nM, about 30 nM to about 35 nM, about 40 nM to about 5 μM, about 40 nM to about 2 μM, about 40 nM to about 1 μM, about 40 nM to about 500 nM, about 40 nM to about 250 nM, about 40 nM to about 240 nM, about 40 nM to about 230 nM, about 40 nM to about 220 nM, about 40 nM to about 210 nM, about 40 nM to about 200 nM, about 40 nM to about 190 nM, about 40 nM to about 180 nM, about 40 nM to about 170 nM, about 40 nM to about 160 nM, about 40 nM to about 150 nM, about 40 nM to about 140 nM, about 40 nM to about 130 nM, about 40 nM to about 120 nM, about 40 nM to about 110 nM, about 40 nM to about 100 nM, about 40 nM to about 95 nM, about 40 nM to about 90 nM, about 40 nM to about 85 nM, about 40 nM to about 80 nM, about 40 nM to about 75 nM, about 40 nM to about 70 nM, about 40 nM to about 65 nM, about 40 nM to about 60 nM, about 40 nM to about 55 nM, about 40 nM to about 50 nM, about 40 nM to about 45 nM, about 50 nM to about 5 μM, about 50 nM to about 2 μM, about 50 nM to about 1 μM, about 50 nM to about 500 nM, about 50 nM to about 250 nM, about 50 nM to about 240 nM, about 50 nM to about 230 nM, about 50 nM to about 220 nM, about 50 nM to about 210 nM, about 50 nM to about 200 nM, about 50 nM to about 190 nM, about 50 nM to about 180 nM, about 50 nM to about 170 nM, about 50 nM to about 160 nM, about 50 nM to about 150 nM, about 50 nM to about 140 nM, about 50 nM to about 130 nM, about 50 nM to about 120 nM, about 50 nM to about 110 nM, about 50 nM to about 100 nM, about 50 nM to about 95 nM, about 50 nM to about 90 nM, about 50 nM to about 85 nM, about 50 nM to about 80 nM, about 50 nM to about 75 nM, about 50 nM to about 70 nM, about 50 nM to about 65 nM, about 50 nM to about 60 nM, about 50 nM to about 55 nM, about 60 nM to about 5 μM, about 60 nM to about 2 μM, about 60 nM to about 1 μM, about 60 nM to about 500 nM, about 60 nM to about 250 nM, about 60 nM to about 240 nM, about 60 nM to about 230 nM, about 60 nM to about 220 nM, about 60 nM to about 210 nM, about 60 nM to about 200 nM, about 60 nM to about 190 nM, about 60 nM to about 180 nM, about 60 nM to about 170 nM, about 60 nM to about 160 nM, about 60 nM to about 150 nM, about 60 nM to about 140 nM, about 60 nM to about 130 nM, about 60 nM to about 120 nM, about 60 nM to about 110 nM, about 60 nM to about 100 nM, about 60 nM to about 95 nM, about 60 nM to about 90 nM, about 60 nM to about 85 nM, about 60 nM to about 80 nM, about 60 nM to about 75 nM, about 60 nM to about 70 nM, about 60 nM to about 65 nM, about 70 nM to about 5 μM, about 70 nM to about 2 μM, about 70 nM to about 1 μM, about 70 nM to about 500 nM, about 70 nM to about 250 nM, about 70 nM to about 240 nM, about 70 nM to about 230 nM, about 70 nM to about 220 nM, about 70 nM to about 210 nM, about 70 nM to about 200 nM, about 70 nM to about 190 nM, about 70 nM to about 180 nM, about 70 nM to about 170 nM, about 70 nM to about 160 nM, about 70 nM to about 150 nM, about 70 nM to about 140 nM, about 70 nM to about 130 nM, about 70 nM to about 120 nM, about 70 nM to about 110 nM, about 70 nM to about 100 nM, about 70 nM to about 95 nM, about 70 nM to about 90 nM, about 70 nM to about 85 nM, about 70 nM to about 80 nM, about 70 nM to about 75 nM, about 80 nM to about 5 μM, about 80 nM to about 2 μM, about 80 nM to about 1 pM, about 80 nM to about 500 nM, about 80 nM to about 250 nM, about 80 nM to about 240 nM, about 80 nM to about 230 nM, about 80 nM to about 220 nM, about 80 nM to about 210 nM, about 80 nM to about 200 nM, about 80 nM to about 190 nM, about 80 nM to about 180 nM, about 80 nM to about 170 nM, about 80 nM to about 160 nM, about 80 nM to about 150 nM, about 80 nM to about 140 nM, about 80 nM to about 130 nM, about 80 nM to about 120 nM, about 80 nM to about 110 nM, about 80 nM to about 100 nM, about 80 nM to about 95 nM, about 80 nM to about 90 nM, about 80 nM to about 85 nM, about 90 nM to about 5 μM, about 90 nM to about 2 μM, about 90 mM to about 1 μM, about 90 nM to about 500 nM, about 90 nM to about 250 nM, about 90 nM to about 240 nM, about 90 nM to about 230 nM, about 90 nM to about 220 nM, about 90 nM to about 210 nM, about 90 nM to about 200 nM, about 90 nM to about 190 nM, about 90 nM to about 180 nM, about 90 nM to about 170 nM, about 90 nM to about 160 nM, about 90 nM to about 150 nM, about 90 nM to about 140 nM, about 90 nM to about 130 nM, about 90 nM to about 120 nM, about 90 nM to about 110 nM, about 90 nM to about 100 nM, about 90 nM to about 95 nM, about 100 nM to about 5 μM, about 100 nM to about 2 pM, about 100 nM to about 1 μM, about 100 nM to about 500 nM, about 100 nM to about 250 nM, about 100 nM to about 240 nM, about 100 nM to about 230 nM, about 100 nM to about 220 nM, about 100 nM to about 210 nM, about 100 nM to about 200 nM, about 100 nM to about 190 nM, about 100 nM to about 180 nM, about 100 nM to about 170 nM, about 100 nM to about 160 nM, about 100 nM to about 150 nM, about 100 nM to about 140 nM, about 100 nM to about 130 nM, about 100 nM to about 120 nM, about 100 nM to about 110 nM, about 110 nM to about 5 μM, about 110 nM to about 2 μM, about 110 nM to about 1 μM, about 110 nM to about 500 nM, about 110 nM to about 250 nM, about 110 nM to about 240 nM, about 110 nM to about 230 nM, about 110 nM to about 220 nM, about 110 nM to about 210 nM, about 110 nM to about 200 nM, about 110 nM to about 190 nM, about 110 nM to about 180 nM, about 110 nM to about 170 nM, about 110 nM to about 160 nM, about 110 nM to about 150 nM, about 110 nM to about 140 nM, about 110 nM to about 130 nM, about 110 nM to about 120 nM, about 120 nM to about 5 μM, about 120 nM to about 2 μM, about 120 nM to about 1 μM, about 120 nM to about 500 nM, about 120 nM to about 250 nM, about 120 nM to about 240 nM, about 120 nM to about 230 nM, about 120 nM to about 220 nM, about 120 nM to about 210 nM, about 120 nM to about 200 nM, about 120 nM to about 190 nM, about 120 nM to about 180 nM, about 120 nM to about 170 nM, about 120 nM to about 160 nM, about 120 nM to about 150 nM, about 120 nM to about 140 nM, about 120 nM to about 130 nM, about 130 nM to about 5 μM, about 130 nM to about 2 μM, about 130 nM to about 1 μM, about 130 nM to about 500 nM, about 130 nM to about 250 nM, about 130 nM to about 240 nM, about 130 nM to about 230 nM, about 130 nM to about 220 nM, about 130 nM to about 210 nM, about 130 nM to about 200 nM, about 130 nM to about 190 nM, about 130 nM to about 180 nM, about 130 nM to about 170 nM, about 130 nM to about 160 nM, about 130 nM to about 150 nM, about 130 nM to about 140 nM, about 140 nM to about 5 μM, about 140 nM to about 2 μM, about 140 nM to about 1 μM, about 140 nM to about 500 nM, about 140 nM to about 250 nM, about 140 nM to about 240 nM, about 140 nM to about 230 nM, about 140 nM to about 220 nM, about 140 nM to about 210 nM, about 140 nM to about 200 nM, about 140 nM to about 190 nM, about 140 nM to about 180 nM, about 140 nM to about 170 nM, about 140 nM to about 160 nM, about 140 nM to about 150 nM, about 150 nM to about 5 μM, about 150 nM to about 2 μM, about 150 nM to about 1 μM, about 150 nM to about 500 nM, about 150 nM to about 250 nM, about 150 nM to about 240 nM, about 150 nM to about 230 nM, about 150 nM to about 220 nM, about 150 nM to about 210 nM, about 150 nM to about 200 nM, about 150 nM to about 190 nM, about 150 nM to about 180 nM, about 150 nM to about 170 nM, about 150 nM to about 160 nM, about 160 nM to about 5 μM, about 160 nM to about 2 μM, about 160 nM to about 1 μM, about 160 nM to about 500 nM, about 160 nM to about 250 nM, about 160 nM to about 240 nM, about 160 nM to about 230 nM, about 160 nM to about 220 nM, about 160 nM to about 210 nM, about 160 nM to about 200 nM, about 160 nM to about 190 nM, about 160 nM to about 180 nM, about 160 nM to about 170 nM, about 170 nM to about 5 μM, about 170 nM to about 2 μM, about 170 nM to about 1 μM, about 170 nM to about 500 nM, about 170 nM to about 250 nM, about 170 nM to about 240 nM, about 170 nM to about 230 nM, about 170 nM to about 220 nM, about 170 nM to about 210 nM, about 170 nM to about 200 nM, about 170 nM to about 190 nM, about 170 nM to about 180 nM, about 180 nM to about 5 μM, about 180 nM to about 2 μM, about 180 nM to about 1 μM, about 180 nM to about 500 nM, about 180 nM to about 250 nM, about 180 nM to about 240 nM, about 180 nM to about 230 nM, about 180 nM to about 220 nM, about 180 nM to about 210 nM, about 180 nM to about 200 nM, about 180 nM to about 190 nM, about 190 nM to about 5 μM, about 190 nM to about 2 μM, about 190 nM to about 1 μM, about 190 nM to about 500 nM, about 190 nM to about 250 nM, about 190 nM to about 240 nM, about 190 nM to about 230 nM, about 190 nM to about 220 nM, about 190 nM to about 210 nM, about 190 nM to about 200 nM, about 200 nM to about 5 μM, about 200 nM to about 2 μM, about 200 nM to about 1 μM, about 200 nM to about 500 nM, about 200 nM to about 250 nM, about 200 nM to about 240 nM, about 200 nM to about 230 nM, about 200 nM to about 220 nM, about 200 nM to about 210 nM, about 210 nM to about 5 μM, about 210 nM to about 2 μM, about 210 nM to about 1 μM, about 210 nM to about 500 nM, about 210 nM to about 250 nM, about 210 nM to about 240 nM, about 210 nM to about 230 nM, about 210 nM to about 220 nM, about 220 nM to about 5 μM, about 220 nM to about 2 μM, about 220 nM to about 1 μM, about 220 nM to about 500 nM, about 220 nM to about 250 nM, about 220 nM to about 240 nM, about 220 nM to about 230 nM, about 230 nM to about 5 μM, about 230 nM to about 2 μM, about 230 nM to about 1 μM, about 230 nM to about 500 nM, about 230 nM to about 250 nM, about 230 nM to about 240 nM, about 240 nM to about 5 μM, about 240 nM to about 2 μM, about 240 nM to about 1 μM, about 240 nM to about 500 nM, about 240 nM to about 250 nM, about 250 nM to about 5 μM, about 250 nM to about 2 μM, about 250 nM to about 1 μM, about 250 nM to about 500 nM, about 500 nM to about 5 μM, about 500 nM to about 2 μM, about 500 nM to about 1 μM, about 1 pM to about 5 μM, about 1 μM to about 2 μM, or about 2 μM to about 5 μM).

[0672] In some embodiments of any of the ABPCs described herein, the K_{D} of the first antigen-binding domain (and optionally, the second antigen-binding domain, if present) at a pH of about 4.0 to about 6.5 (e.g., any of the subranges of this range described herein) can be greater than 1 nM (e.g., between about 1 nM to about 1 mM, about 1 nM to about 900 μM, about 1 nM to about 800 μM, about 1 nM to about 700 μM, about 1 nM to about 600 μM, about 1 nM to about 500 μM, about 1 nM to about 400 μM, about 1 nM to about 300 μM, about 1 nM to about 200 μM, about 1 nM to about 100 μM, about 1 nM to about 90 μM, about 1 nM to about 80 μM, about 1 nM to about 70 μM, about 1 nM to about 60 μM, about 1 nM to about 50 μM, about 1 nM to about 40 μM, about 1 nM to about 30 μM, about 1 nM to about 20 μM, about 1 nM to about 10 μM, about 1 nM to about 5 μM, about 1 nM to about 4 μM, about 1 nM to about 2 μM, about 1 nM to about 1 μM, about 1 nM to about 900 nM, about 1 nM to about 800 nM, about 1 nM to about 700 nM, about 1 nM to about 600 nM, about 1 nM to about 500 nM, about 1 nM to about 400 nM, about 1 nM to about 300 nM, about 1 nM to about 200 nM, about 1 nM to about 100 nM, about 1 nM to about 90 nM, about 1 nM to about 80 nM, about 1 nM to about 70 nM, about 1 nM to about 60 nM, about 1 nM to about 50 nM, about 1 nM to about 40 nM, about 1 nM to about 30 nM, about 2 nM to about 1 mM, about 2 nM to about 900 μM, about 2 nM to about 800 μM, about 2 nM to about 700 μM, about 2 nM to about 600 μM, about 2 nM to about 500 μM, about 2 nM to about 400 μM, about 2 nM to about 300 μM, about 2 nM to about 200 μM, about 2 nM to about 100 μM, about 2 nM to about 90 μM, about 2 nM to about 80 μM, about 2 nM to about 70 μM, about 2 nM to about 60 μM, about 2 nM to about 50 μM, about 2 nM to about 40 μM, about 2 nM to about 30 μM, about 2 nM to about 20 μM, about 2 nM to about 10 μM, about 2 nM to about 5 μM, about 2 nM to about 4 μM, about 2 nM to about 2 μM, about 2 nM to about 1 μM, about 2 nM to about 900 nM, about 2 nM to about 800 nM, about 2 nM to about 700 nM, about 2 nM to about 600 nM, about 2 nM to about 500 nM, about 2 nM to about 400 nM, about 2 nM to about 300 nM, about 2 nM to about 200 nM, about 2 nM to about 100 nM, about 2 nM to about 90 nM, about 2 nM to about 80 nM, about 2 nM to about 70 nM, about 2 nM to about 60 nM, about 2 nM to about 50 nM, about 2 nM to about 40 nM, about 2 nM to about 30 nM, about 5 nM to about 1 mM, about 5 nM to about 900 μM, about 5 nM to about 800 μM, about 5 nM to about 700 μM, about 5 nM to about 600 μM, about 5 nM to about 500 μM, about 5 nM to about 400 μM, about 5 nM to about 300 μM, about 5 nM to about 200 μM, about 5 nM to about 100 μM, about 5 nM to about 90 μM, about 5 nM to about 80 μM, about 5 nM to about 70 μM, about 5 nM to about 60 μM, about 5 nM to about 50 μM, about 5 nM to about 40 μM, about 5 nM to about 30 μM, about 5 nM to about 20 μM, about 5 nM to about 10 μM, about 5 nM to about 5 μM, about 5 nM to about 4 μM, about 5 nM to about 2 μM, about 5 nM to about 1 μM, about 5 nM to about 900 nM, about 5 nM to about 800 nM, about 5 nM to about 700 nM, about 5 nM to about 600 nM, about 5 nM to about 500 nM, about 5 nM to about 400 nM, about 5 nM to about 300 nM, about 5 nM to about 200 nM, about 5 nM to about 100 nM, about 5 nM to about 90 nM, about 5 nM to about 80 nM, about 5 nM to about 70 nM, about 5 nM to about 60 nM, about 5 nM to about 50 nM, about 5 nM to about 40 nM, about 5 nM to about 30 nM, about 10 nM to about 1 mM, about 10 nM to about 900 μM, about 10 nM to about 800 μM, about 10 nM to about 700 μM, about 10 nM to about 600 μM, about 10 nM to about 500 μM, about 10 nM to about 400 μM, about 10 nM to about 300 μM, about 10 nM to about 200 μM, about 10 nM to about 100 μM, about 10 nM to about 90 μM, about 10 nM to about 80 μM, about 10 nM to about 70 μM, about 10 nM to about 60 μM, about 10 nM to about 50 μM, about 10 nM to about 40 μM, about 10 nM to about 30 μM, about 10 nM to about 20 μM, about 10 nM to about 10 μM, about 10 nM to about 5 μM, about 10 nM to about 4 μM, about 10 nM to about 2 μM, about 10 nM to about 1 μM, about 10 nM to about 900 nM, about 10 nM to about 800 nM, about 10 nM to about 700 nM, about 10 nM to about 600 nM, about 10 nM to about 500 nM, about 10 nM to about 400 nM, about 10 nM to about 300 nM, about 10 nM to about 200 nM, about 10 nM to about 100 nM, about 10 nM to about 90 nM, about 10 nM to about 80 nM, about 10 nM to about 70 nM, about 10 nM to about 60 nM, about 10 nM to about 50 nM, about 10 nM to about 40 nM, about 10 nM to about 30 nM, about 20 nM to about 1 mM, about 20 nM to about 900 μM, about 20 nM to about 800 μM, about 20 nM to about 700 μM, about 20 nM to about 600 μM, about 20 nM to about 500 μM, about 20 nM to about 400 μM, about 20 nM to about 300 μM, about 20 nM to about 200 μM, about 20 nM to about 100 μM, about 20 nM to about 90 μM, about 20 nM to about 80 μM, about 20 nM to about 70 μM, about 20 nM to about 60 μM, about 20 nM to about 50 μM, about 20 nM to about 40 μM, about 20 nM to about 30 μM, about 20 nM to about 20 μM, about 20 nM to about 10 μM, about 20 nM to about 5 μM, about 20 nM to about 4 μM, about 20 nM to about 2 μM, about 20 nM to about 1 μM, about 20 nM to about 900 nM, about 20 nM to about 800 nM, about 20 nM to about 700 nM, about 20 nM to about 600 nM, about 20 nM to about 500 nM, about 20 nM to about 400 nM, about 20 nM to about 300 nM, about 20 nM to about 200 nM, about 20 nM to about 100 nM, about 20 nM to about 90 nM, about 20 nM to about 80 nM, about 20 nM to about 70 nM, about 20 nM to about 60 nM, about 20 nM to about 50 nM, about 20 nM to about 40 nM, about 20 nM to about 30 nM; about 1 μM to about 1 mM, about 1 μM to about 900 μM, about 1 μM to about 800 μM, about 1 μM to about 700 μM, about 1 μM to about 600 μM, about 1 μM to about 500 μM, about 1 μM to about 400 μM, about 1 μM to about 300 μM, about 1 μM to about 200 μM, about 1 μM to about 100 μM, about 1 μM to about 90 μM, about 1 μM to about 80 μM, about 1 μM to about 70 μM, about 1 μM to about 60 μM, about 1 μM to about 50 μM, about 1 μM to about 40 μM, about 1 μM to about 30 μM, about 1 μM to about 20 μM, about 1 μM to about 10 μM, about 1 μM to about 5 μM, about 1 μM to about 4 μM, about 1 μM to about 3 μM, about 1 μM to about 2 μM, about 2 μM to about 1 mM, about 2 μM to about 900 μM, about 2 μM to about 800 μM, about 2 μM to about 700 μM, about 2 μM to about 600 μM, about 2 μM to about 500 μM, about 2 μM to about 400 μM, about 2 μM to about 300 μM, about 2 μM to about 200 μM, about 2 μM to about 100 μM, about 2 μM to about 90 μM, about 2 μM to about 80 μM, about 2 μM to about 70 μM, about 2 μM to about 60 μM, about 2 μM to about 50 μM, about 2 μM to about 40 μM, about 2 μM to about 30 μM, about 2 μM to about 20 μM, about 2 μM to about 10 μM, about 2 μM to about 5 μM, about 2 μM to about 4 μM, about 2 μM to about 3 μM, about 5 μM to about 1 mM, about 5 μM to about 900 μM, about 5 μM to about 800 μM, about 5 μM to about 700 μM, about 5 μM to about 600 μM, about 5 μM to about 500 μM, about 5 μM to about 400 μM, about 5 μM to about 300 μM, about 5 μM to about 200 μM, about 5 μM to about 100 μM, about 5 μM to about 90 μM, about 5 μM to about 80 μM, about 5 μM to about 70 μM, about 5 μM to about 60 μM, about 5 μM to about 50 μM, about 5 μM to about 40 μM, about 5 μM to about 30 μM, about 5 μM to about 20 μM, about 5 μM to about 10 μM, about 10 μM to about 1 mM, about 10 μM to about 900 μM, about 10 μM to about 800 μM, about 10 μM to about 700 μM, about 10 μM to about 600 μM, about 10 μM to about 500 μM, about 10 μM to about 400 μM, about 10 μM to about 300 μM, about 10 μM to about 200 μM, about 10 μM to about 100 μM, about 10 μM to about 90 μM, about 10 μM to about 80 μM, about 10 μM to about 70 μM, about 10 μM to about 60 μM, about 10 μM to about 50 μM, about 10 μM to about 40 μM, about 10 μM to about 30 μM, about 10 μM to about 20 μM, about 20 μM to about 1 mM, about 20 μM to about 900 μM, about 20 μM to about 800 μM, about 20 μM to about 700 μM, about 20 μM to about 600 μM, about 20 μM to about 500 μM, about 20 μM to about 400 μM, about 20 μM to about 300 μM, about 20 μM to about 200 μM, about 20 μM to about 100 μM, about 20 μM to about 90 μM, about 20 μM to about 80 μM, about 20 μM to about 70 μM, about 20 μM to about 60 μM, about 20 μM to about 50 μM, about 20 μM to about 40 μM, about 20 μM to about 30 μM, about 30 μM to about 1 mM, about 30 μM to about 900 μM, about 30 μM to about 800 μM, about 30 μM to about 700 μM, about 30 μM to about 600 μM, about 30 μM to about 500 μM, about 30 μM to about 400 μM, about 30 μM to about 300 μM, about 30 μM to about 200 μM, about 30 μM to about 100 μM, about 30 μM to about 90 μM, about 30 μM to about 80 μM, about 30 μM to about 70 μM, about 30 μM to about 60 μM, about 30 μM to about 50 μM, about 30 μM to about 40 μM, about 40 μM to about 1 mM, about 40 μM to about 900 μM, about 40 μM to about 800 μM, about 40 μM to about 700 μM, about 40 μM to about 600 μM, about 40 μM to about 500 μM, about 40 μM to about 400 μM, about 40 μM to about 300 μM, about 40 μM to about 200 μM, about 40 μM to about 100 μM, about 40 μM to about 90 μM, about 40 μM to about 80 μM, about 40 μM to about 70 μM, about 40 μM to about 60 μM, about 40 μM to about 50 μM, about 50 μM to about 1 mM, about 50 μM to about 900 μM, about 50 μM to about 800 μM, about 50 μM to about 700 μM, about 50 μM to about 600 μM, about 50 μM to about 500 μM, about 50 μM to about 400 μM, about 50 μM to about 300 μM, about 50 μM to about 200 μM, about 50 μM to about 100 μM, about 50 μM to about 90 μM, about 50 μM to about 80 μM, about 50 μM to about 70 μM, about 50 μM to about 60 μM, about 60 μM to about 1 mM, about 60 μM to about 900 μM, about 60 μM to about 800 μM, about 60 μM to about 700 μM, about 60 μM to about 600 μM, about 60 μM to about 500 μM, about 60 μM to about 400 μM, about 60 μM to about 300 μM, about 60 μM to about 200 μM, about 60 μM to about 100 μM, about 60 μM to about 90 μM, about 60 μM to about 80 μM, about 60 μM to about 70 μM, about 70 μM to about 1 mM, about 70 μM to about 900 μM, about 70 μM to about 800 μM, about 70 μM to about 700 μM, about 70 μM to about 600 μM, about 70 μM to about 500 μM, about 70 μM to about 400 μM, about 70 μM to about 300 μM, about 70 μM to about 200 μM, about 70 μM to about 100 μM, about 70 μM to about 90 μM, about 70 μM to about 80 μM, about 80 μM to about 1 mM, about 80 μM to about 900 μM, about 80 μM to about 800 μM, about 80 μM to about 700 μM, about 80 μM to about 600 μM, about 80 μM to about 500 μM, about 80 μM to about 400 μM, about 80 μM to about 300 μM, about 80 μM to about 200 μM, about 80 μM to about 100 μM, about 80 μM to about 90 μM, about 90 μM to about 1 mM, about 90 μM to about 900 μM, about 90 μM to about 800 μM, about 90 μM to about 700 μM, about 90 μM to about 600 μM, about 90 μM to about 500 μM, about 90 μM to about 400 μM, about 90 μM to about 300 μM, about 90 μM to about 200 μM, about 90 μM to about 100 μM, about 100 μM to about 1 mM, about 100 μM to about 900 μM, about 100 μM to about 800 μM, about 100 μM to about 700 μM, about 100 μM to about 600 μM, about 100 μM to about 500 μM, about 100 μM to about 400 μM, about 100 μM to about 300 μM, about 100 μM to about 200 μM, about 200 μM to about 1 mM, about 200 μM to about 900 μM, about 200 μM to about 800 μM, about 200 μM to about 700 μM, about 200 μM to about 600 μM, about 200 μM to about 500 μM, about 200 μM to about 400 μM, about 200 μM to about 300 μM, about 300 μM to about 1 mM, about 300 μM to about 900 μM, about 300 μM to about 800 μM, about 300 μM to about 700 μM, about 300 μM to about 600 μM, about 300 μM to about 500 μM, about 300 μM to about 400 μM, about 400 μM to about 1 mM, about 400 μM to about 900 μM, about 400 μM to about 800 μM, about 400 μM to about 700 μM, about 400 μM to about 600 μM, about 400 μM to about 500 μM, about 500 μM to about 1 mM, about 500 μM to about 900 μM, about 500 μM to about 800 μM, about 500 μM to about 700 μM, about 500 μM to about 600 μM, about 600 μM to about 1 mM, about 600 μM to about 900 μM, about 600 μM to about 800 μM, about 600 μM to about 700 μM, about 700 μM to about 1 mM, about 700 μM to about 900 μM, about 700 μM to about 800 μM, about 800 μM to about 1 mM, about 800 μM to about 900 μM, or about 900 μM to about 1 mM).

[0673] A variety of different methods known in the art can be used to determine the K_{D} values of any of the antigen-binding protein constructs described herein (e.g., an electrophoretic mobility shift assay, a filter binding assay, surface plasmon resonance, a biomolecular binding kinetics assay, in vitro binding assay on antigen-expressing cells, etc.).

[0674] In some examples of any of the ABPCs described herein, the half-life of the ABPC in vivo is decreased (e.g., a detectable decrease) (e.g., at least a 1% decrease, at least a 5% decrease, at least a 10% decrease, at least a 15% decrease, at least a 20% decrease, at least a 25% decrease, at least a 30% decrease, at least a 35% decrease, at least a 40% decrease, at least a 45% decrease, at least a 50% decrease, at least a 55% decrease, at least a 60% decrease, at least a 65% decrease, at least a 70% decrease, at least a 75% decrease, at least a 80% decrease, at least a 85% decrease, at least a 90% decrease, at least a 95% decrease, or at least a 99% decrease, or about a 1% decrease to about a 99% decrease, about a 1% decrease to about a 95% decrease, about a 1% decrease to about a 90% decrease, about a 1% decrease to about a 85% decrease, about a 1% decrease to about a 80% decrease, about a 1% decrease to about a 75% decrease, about a 1% decrease to about a 70% decrease, about a 1% decrease to about a 65% decrease, about a 1% decrease to about a 60% decrease, about a 1% decrease to about a 55% decrease, about a 1% decrease to about a 50% decrease, about a 1% decrease to about a 45% decrease, about a 1% decrease to about a 40% decrease, about a 1% decrease to about a 35% decrease, about a 1% decrease to about a 30% decrease, about a 1% decrease to about a 25% decrease, about a 1% decrease to about a 20% decrease, about a 1% decrease to about a 15% decrease, about a 1% decrease to about a 10% decrease, about a 1% decrease to about a 5% decrease, about a 5% decrease to about a 99% decrease, about a 5% decrease to about a 95% decrease, about a 5% decrease to about a 90% decrease, about a 5% decrease to about a 85% decrease, about a 5% decrease to about a 80% decrease, about a 5% decrease to about a 75% decrease, about a 5% decrease to about a 70% decrease, about a 5% decrease to about a 65% decrease, about a 5% decrease to about a 60% decrease, about a 5% decrease to about a 55% decrease, about a 5% decrease to about a 50% decrease, about a 5% decrease to about a 45% decrease, about a 5% decrease to about a 40% decrease, about a 5% decrease to about a 35% decrease, about a 5% decrease to about a 30% decrease, about a 5% decrease to about a 25% decrease, about a 5% decrease to about a 20% decrease, about a 5% decrease to about a 15% decrease, about a 5% decrease to about a 10% decrease, about a 10% decrease to about a 99% decrease, about a 10% decrease to about a 95% decrease, about a 10% decrease to about a 90% decrease, about a 10% decrease to about a 85% decrease, about a 10% decrease to about a 80% decrease, about a 10% decrease to about a 75% decrease, about a 10% decrease to about a 70% decrease, about a 10% decrease to about a 65% decrease, about a 10% decrease to about a 60% decrease, about a 10% decrease to about a 55% decrease, about a 10% decrease to about a 50% decrease, about a 10% decrease to about a 45% decrease, about a 10% decrease to about a 40% decrease, about a 10% decrease to about a 35% decrease, about a 10% decrease to about a 30% decrease, about a 10% decrease to about a 25% decrease, about a 10% decrease to about a 20% decrease, about a 10% decrease to about a 15% decrease, about a 15% decrease to about a 99% decrease, about a 15% decrease to about a 95% decrease, about a 15% decrease to about a 90% decrease, about a 15% decrease to about a 85% decrease, about a 15% decrease to about a 80% decrease, about a 15% decrease to about a 75% decrease, about a 15% decrease to about a 70% decrease, about a 15% decrease to about a 65% decrease, about a 15% decrease to about a 60% decrease, about a 15% decrease to about a 55% decrease, about a 15% decrease to about a 50% decrease, about a 15% decrease to about a 45% decrease, about a 15% decrease to about a 40% decrease, about a 15% decrease to about a 35% decrease, about a 15% decrease to about a 30% decrease, about a 15% decrease to about a 25% decrease, about a 15% decrease to about a 20% decrease, about a 20% decrease to about a 99% decrease, about a 20% decrease to about a 95% decrease, about a 20% decrease to about a 90% decrease, about a 20% decrease to about a 85% decrease, about a 20% decrease to about a 80% decrease, about a 20% decrease to about a 75% decrease, about a 20% decrease to about a 70% decrease, about a 20% decrease to about a 65% decrease, about a 20% decrease to about a 60% decrease, about a 20% decrease to about a 55% decrease, about a 20% decrease to about a 50% decrease, about a 20% decrease to about a 45% decrease, about a 20% decrease to about a 40% decrease, about a 20% decrease to about a 35% decrease, about a 20% decrease to about a 30% decrease, about a 20% decrease to about a 25% decrease, about a 25% decrease to about a 99% decrease, about a 25% decrease to about a 95% decrease, about a 25% decrease to about a 90% decrease, about a 25% decrease to about a 85% decrease, about a 25% decrease to about a 80% decrease, about a 25% decrease to about a 75% decrease, about a 25% decrease to about a 70% decrease, about a 25% decrease to about a 65% decrease, about a 25% decrease to about a 60% decrease, about a 25% decrease to about a 55% decrease, about a 25% decrease to about a 50% decrease, about a 25% decrease to about a 45% decrease, about a 25% decrease to about a 40% decrease, about a 25% decrease to about a 35% decrease, about a 25% decrease to about a 30% decrease, about a 30% decrease to about a 99% decrease, about a 30% decrease to about a 95% decrease, about a 30% decrease to about a 90% decrease, about a 30% decrease to about a 85% decrease, about a 30% decrease to about a 80% decrease, about a 30% decrease to about a 75% decrease, about a 30% decrease to about a 70% decrease, about a 30% decrease to about a 65% decrease, about a 30% decrease to about a 60% decrease, about a 30% decrease to about a 55% decrease, about a 30% decrease to about a 50% decrease, about a 30% decrease to about a 45% decrease, about a 30% decrease to about a 40% decrease, about a 30% decrease to about a 35% decrease, about a 35% decrease to about a 99% decrease, about a 35% decrease to about a 95% decrease, about a 35% decrease to about a 90% decrease, about a 35% decrease to about a 85% decrease, about a 35% decrease to about a 80% decrease, about a 35% decrease to about a 75% decrease, about a 35% decrease to about a 70% decrease, about a 35% decrease to about a 65% decrease, about a 35% decrease to about a 60% decrease, about a 35% decrease to about a 55% decrease, about a 35% decrease to about a 50% decrease, about a 35% decrease to about a 45% decrease, about a 35% decrease to about a 40% decrease, about a 40% decrease to about a 99% decrease, about a 40% decrease to about a 95% decrease, about a 40% decrease to about a 90% decrease, about a 40% decrease to about a 85% decrease, about a 40% decrease to about a 80% decrease, about a 40% decrease to about a 75% decrease, about a 40% decrease to about a 70% decrease, about a 40% decrease to about a 65% decrease, about a 40% decrease to about a 60% decrease, about a 40% decrease to about a 55% decrease, about a 40% decrease to about a 50% decrease, about a 40% decrease to about a 45% decrease, about a 45% decrease to about a 99% decrease, about a 45% decrease to about a 95% decrease, about a 45% decrease to about a 90% decrease, about a 45% decrease to about a 85% decrease, about a 45% decrease to about a 80% decrease, about a 45% decrease to about a 75% decrease, about a 45% decrease to about a 70% decrease, about a 45% decrease to about a 65% decrease, about a 45% decrease to about a 60% decrease, about a 45% decrease to about a 55% decrease, about a 45% decrease to about a 50% decrease, about a 50% decrease to about a 99% decrease, about a 50% decrease to about a 95% decrease, about a 50% decrease to about a 90% decrease, about a 50% decrease to about a 85% decrease, about a 50% decrease to about a 80% decrease, about a 50% decrease to about a 75% decrease, about a 50% decrease to about a 70% decrease, about a 50% decrease to about a 65% decrease, about a 50% decrease to about a 60% decrease, about a 50% decrease to about a 55% decrease, about a 55% decrease to about a 99% decrease, about a 55% decrease to about a 95% decrease, about a 55% decrease to about a 90% decrease, about a 55% decrease to about a 85% decrease, about a 55% decrease to about a 80% decrease, about a 55% decrease to about a 75% decrease, about a 55% decrease to about a 70% decrease, about a 55% decrease to about a 65% decrease, about a 55% decrease to about a 60% decrease, about a 60% decrease to about a 99% decrease, about a 60% decrease to about a 95% decrease, about a 60% decrease to about a 90% decrease, about a 60% decrease to about a 85% decrease, about a 60% decrease to about a 80% decrease, about a 60% decrease to about a 75% decrease, about a 60% decrease to about a 70% decrease, about a 60% decrease to about a 65% decrease, about a 65% decrease to about a 99% decrease, about a 65% decrease to about a 95% decrease, about a 65% decrease to about a 90% decrease, about a 65% decrease to about a 85% decrease, about a 65% decrease to about a 80% decrease, about a 65% decrease to about a 75% decrease, about a 65% decrease to about a 70% decrease, about a 70% decrease to about a 99% decrease, about a 70% decrease to about a 95% decrease, about a 70% decrease to about a 90% decrease, about a 70% decrease to about a 85% decrease, about a 70% decrease to about a 80% decrease, about a 70% decrease to about a 75% decrease, about a 75% decrease to about a 99% decrease, about a 75% decrease to about a 95% decrease, about a 75% decrease to about a 90% decrease, about a 75% decrease to about a 85% decrease, about a 75% decrease to about a 80% decrease, about a 80% decrease to about a 99% decrease, about a 80% decrease to about a 95% decrease, about a 80% decrease to about a 90% decrease, about a 80% decrease to about a 85% decrease, about a 85% decrease to about a 99% decrease, about a 85% decrease to about a 95% decrease, about a 85% decrease to about a 90% decrease, about a 90% decrease to about a 99% decrease, about a 90% decrease to about a 95% decrease, or about a 95% decrease to about a 99% decrease) as compared to the half-life of a control ABPC (e.g., any of the exemplary control ABPCs described herein).

### Conjugation

[0675] In some embodiments, the ABPCs provided herein can be conjugated to a drug (e.g., a chemotherapeutic drug, a small molecule), a toxin, or a radioisotope. Non-limiting examples of drugs, toxins, and radioisotopes (e.g., known to be useful for the treatment of cancer) are known in the art.

[0676] In some embodiments, at least one polypeptide of any of the ABPCs described herein is conjugated to the toxin, the radioisotope, or the drug via a cleavable linker. In some embodiments, the cleavable linker includes a protease cleavage site. In some embodiments, the cleavable linker is cleaved on the ABPC once it is transported to the lysosome or late endosome by the target mammalian cell. In some embodiments, cleavage of the linker functionally activates the drug or toxin.

[0677] In some embodiments, at least one polypeptide of any of the ABPCs described herein is conjugated to the toxin, the radioisotope, or the drug via a non-cleavable linker. In some embodiments, the conjugated toxin, radioisotope, or drug is released during lysosomal and/or late endosomal degradation of the ABPC.

[0678] Non-limiting examples of cleavable linkers include: hydrazone linkers, peptide linkers, disulfide linkers, and thioether linkers. See, e.g., Carter et al., Cancer J. 14(3):154-169, 2008; Sanderson et al., Clin. Cancer Res. 11(2 Ptl):843-852, 2005; Chari et al., Acc. Chem. Res. 41(1):98-107, 2008; Oflazoglu et al., Clin. Cancer Res. 14(19): 6171-6180, 2008; and Lu et al., Int. J. Mol. Sci. 17(4): 561, 2016.

[0679] Non-limiting examples of non-cleavable linkers include: maleimide alkane-linkers and meleimide cyclohexane linker (MMC) (see, e.g., those described in McCombs et al., AAPSJ. 17(2):339-351, 2015).

[0680] In some embodiments, any of the ABPCs described herein is cytotoxic or cytostatic to the target mammalian cell.

### Expression of an Antigen-Binding Protein Construct in a Cell

[0681] Also provided herein are methods of generating a recombinant cell that expresses an ABPC (e.g., any of the ABPCs described herein) that include: introducing into a cell a nucleic acid encoding the ABPC to produce a recombinant cell; and culturing the recombinant cell under conditions sufficient for the expression of the ABPC. In some embodiments, the introducing step includes introducing into a cell an expression vector including a nucleic acid encoding the ABPC to produce a recombinant cell.

[0682] Any of the ABPCs described herein can be produced by any cell, e.g., a eukaryotic cell or a prokaryotic cell. As used herein, the term “eukaryotic cell” refers to a cell having a distinct, membrane-bound nucleus. Such cells may include, for example, mammalian (e.g., rodent, non-human primate, or human), insect, fungal, or plant cells. In some embodiments, the eukaryotic cell is a yeast cell, such as Saccharomyces cerevisiae. In some embodiments, the eukaryotic cell is a higher eukaryote, such as mammalian, avian, plant, or insect cells. As used herein, the term “prokaryotic cell” refers to a cell that does not have a distinct, membrane-bound nucleus. In some embodiments, the prokaryotic cell is a bacterial cell.

[0683] Methods of culturing cells are well known in the art. Cells can be maintained in vitro under conditions that favor proliferation, differentiation, and growth. Briefly, cells can be cultured by contacting a cell (e.g., any cell) with a cell culture medium that includes the necessary growth factors and supplements to support cell viability and growth.

[0684] Methods of introducing nucleic acids and expression vectors into a cell (e.g., a eukaryotic cell) are known in the art. Non-limiting examples of methods that can be used to introduce a nucleic acid into a cell include lipofection, transfection, electroporation, microinjection, calcium phosphate transfection, dendrimer-based transfection, cationic polymer transfection, cell squeezing, sonoporation, optical transfection, impalection, hydrodynamic delivery, magnetofection, viral transduction (e.g., adenoviral and lentiviral transduction), and nanoparticle transfection.

[0685] Provided herein are methods that further include isolation of the ABPCs from a cell (e.g., a eukaryotic cell) using techniques well-known in the art (e.g., ammonium sulfate precipitation, polyethylene glycol precipitation, ion-exchange chromatography (anion or cation), chromatography based on hydrophobic interaction, metal-affinity chromatography, ligand-affinity chromatography, and size exclusion chromatography).

### Methods of Treatment

[0686] Provided herein are methods of treating a cancer characterized by having a population of cancer cells that have DLL3 or an epitope of DLL3 presented on their surface, that include: administering a therapeutically effective amount of any of the pharmaceutical compositions described herein or any of the ABPCs described herein to a subject identified as having a cancer characterized by having the population of cancer cells.

[0687] Also provided herein are methods of reducing the volume of a tumor in a subject, wherein the tumor is characterized by having a population of cancer cells that have DLL3 or an epitope of DLL3 presented on their surface, that include: administering a therapeutically effective amount of any of the pharmaceutical compositions described herein or any of the ABPCs described herein to a subject identified as having a cancer characterized by having the population of cancer cells. In some embodiments of any of the methods described herein, the volume of at least one (e.g., 1, 2, 3, 4, or 5) tumor (e.g., solid tumor) or tumor location (e.g., a site of metastasis) is reduced (e.g., a detectable reduction) by at least 1%, at least 2%, at least 3%, at least 4%, at least 5%, at least 6%, at least 8%, at least 10%, at least 12%, at least 14%, at least 16%, at least 18%, at least 20%, at least 22%, at least 24%, at least 26%, at least 28%, at least 30%, at least 35%, at least 40%, at least 45%, at least 50%, at least 55%, at least 60%, at least 65%, at least 70%, at least 75%, at least 80%, at least 85%, at least 90%, at least 95%, or at least 99%) reduced as compared to the size of the at least one tumor (e.g., solid tumor) before administration of the ABPC.

[0688] Also provided herein are methods of inducing cell death in a cancer cell in a subject, wherein the cancer cell has DLL3 or an epitope of DLL3 presented on its surface, that include: administering a therapeutically effective amount of any of the pharmaceutical compositions of described herein or any of the ABPCs described herein to a subject identified as having a cancer characterized as having the population of cancer cells. In some embodiments, the cell death that is induced is necrosis. In some embodiments, the cell death that is induced is apoptosis.

[0689] In some embodiments of any of the methods described herein, the cancer is a primary tumor.

[0690] In some embodiments of any of the methods described herein, the cancer is a metastasis.

[0691] In some embodiments of any of the methods described herein, the cancer is a non-T-cell-infiltrating tumor. In some embodiments of any of the methods described herein, the cancer is a T-cell-infiltrating tumor.

[0692] Provided herein are methods of decreasing the risk of developing a metastasis or decreasing the risk of developing an additional metastasis in a subject having a cancer, wherein the cancer is characterized by having a population of cancer cells that have DLL3 or an epitope of DLL3 presented on their surface, that include: administering a therapeutically effective amount of any of the pharmaceutical compositions of described herein or any of the ABPCs described herein to a subject identified as having a cancer characterized as having the population of cancer cells. In some embodiments, the risk of developing a metastasis or the risk of developing an additional metastasis is decreased (e.g., a detectable decrease) by at least 1%, by at least 2%, at least 3%, at least 4%, at least 5%, at least 6%, at least 8%, at least 10%, at least 12%, at least 14%, at least 16%, at least 18%, at least 20%, at least 25%, at least 30%, at least 35%, at least 40%, at least 45%, at least 50%, at least 55%, at least 60%, at least 65%, at least 70%, at least 75%, at least 80%, at least 85%, at least 90%, at least 95%, or at least 99% in the subject as compared to the risk of a subject having a similar cancer, but administered no treatment or a treatment that does not include the administration of any of the ABPCs described herein.

[0693] In some embodiments of any of the methods described herein, the cancer is a non-T-cell-infiltrating tumor. In some embodiments of any of the methods described herein, the cancer is a T-cell-infiltrating tumor. In some embodiments of any of the methods described herein, the cellular compartment is part of the endosomal/lysosomal pathway. In some embodiments of any of the methods described herein, the cellular compartment is an endosome.

[0694] The term “subject” refers to any mammal. In some embodiments, the subject or “subject suitable for treatment” may be a canine (e.g., a dog), feline (e.g., a cat), equine (e.g., a horse), ovine, bovine, porcine, caprine, primate, e.g., a simian (e.g., a monkey (e.g., marmoset, baboon), or an ape (e.g., a gorilla, chimpanzee, orangutan, or gibbon) or a human; or rodent (e.g., a mouse, a guinea pig, a hamster, or a rat). In some embodiments, the subject or “subject suitable for treatment” may be a non-human mammal, especially mammals that are conventionally used as models for demonstrating therapeutic efficacy in humans (e.g., murine, lapine, porcine, canine or primate animals) may be employed.

[0695] As used herein, treating includes reducing the number, frequency, or severity of one or more (e.g., two, three, four, or five) signs or symptoms of a cancer in a patient having a cancer (e.g., any of the cancers described herein). For example, treatment can reducing cancer progression, reduce the severity of a cancer, or reduce the risk of re-occurrence of a cancer in a subject having the cancer.

[0696] Provided herein are methods of inhibiting the growth of a solid tumor in a subject (e.g., any of the subjects described herein) that include administering to the subject a therapeutically effective amount of any of the ABPCs described herein or any of the pharmaceutical compositions described herein (e.g., as compared to the growth of the solid tumor in the subject prior to treatment or the growth of a similar solid tumor in a different subject receiving a different treatment or receiving no treatment).

[0697] In some embodiments of any of the methods described herein, the growth of a solid tumor is primary growth of a solid tumor. In some embodiments of any of the methods described herein, the growth of a solid tumor is recurrent growth of a solid tumor. In some embodiments of any of the methods described herein, the growth of a solid tumor is metastatic growth of a solid tumor. In some embodiments, treatment results in about a 1% decrease to about 99% decrease (or any of the subranges of this range described herein) in the growth of a solid tumor in the subject (e.g., as compared to the growth of the solid tumor in the subject prior to treatment or the growth of a similar solid tumor in a different subject receiving a different treatment or receiving no treatment). The growth of a solid tumor in a subject can be assessed by a variety of different imaging methods, e.g., positron emission tomograph, X-ray computed tomography, computed axial tomography, and magnetic resonance imaging.

[0698] Also provided herein are methods of decreasing the risk of developing a metastasis or developing an additional metastasis over a period of time in a subject identified as having a cancer (e.g., any of the exemplary cancers described herein) that include administering to the subject a therapeutically effective amount of any of the proteins described herein or any of the pharmaceutical compositions described herein (e.g., as compared to a subject having a similar cancer and receiving a different treatment or receiving no treatment). In some embodiments of any of the methods described herein, the metastasis or additional metastasis is one or more to a bone, lymph nodes, brain, lung, liver, skin, chest wall including bone, cartilage and soft tissue, abdominal cavity, contralateral breast, soft tissue, muscle, bone marrow, ovaries, adrenal glands, and pancreas.

[0699] In some embodiments of any of the methods described herein, the period of time is about 1 month to about 3 years (e.g., about 1 month to about 2.5 years, about 1 month to about 2 years, about 2 months to about 1.5 years, about 1 month to about 1 year, about 1 month to about 10 months, about 1 month to about 8 months, about 1 month to about 6 months, about 1 month to about 5 months, about 1 month to about 4 months, about 1 month to about 3 months, about 1 month to about 2 months, about 2 months to about 3 years, about 2 months to about 2.5 years, about 2 months to about 2 years, about 2 months to about 1.5 years, about 2 months to about 1 year, about 2 months to about 10 months, about 2 months to about 8 months, about 2 months to about 6 months, about 2 months to about 5 months, about 2 months to about 4 months, about 2 months to about 3 months, about 3 months to about 3 years, about 3 months to about 2.5 years, about 3 months to about 2 years, about 3 months to about 1.5 years, about 3 months to about 1 year, about 3 months to about 10 months, about 3 months to about 8 months, about 3 months to about 6 months, about 3 months to about 5 months, about 3 months to about 4 months, about 4 months to about 3 years, about 4 months to about 2.5 years, about 4 months to about 2 years, about 4 months to about 1.5 years, about 4 months to about 1 year, about 4 months to about 10 months, about 4 months to about 8 months, about 4 months to about 6 months, about 4 months to about 5 months, about 5 months to about 3 years, about 5 months to about 2.5 years, about 5 months to about 2 years, about 5 months to about 1.5 years, about 5 months to about 1 year, about 5 months to about 10 months, about 5 months to about 8 months, about 5 months to about 6 months, about 6 months to about 3 years, about 6 months to about 2.5 years, about 6 months to about 2 years, about 6 months to about 1.5 years, about 6 months to about 1 year, about 6 months to about 10 months, about 6 months to about 8 months, about 8 months to about 3 years, about 8 months to about 2.5 years, about 8 months to about 2 years, about 8 months to about 1.5 years, about 8 months to about 1 year, about 8 months to about 10 months, about 10 months to about 3 years, about 10 months to about 2.5 years, about 10 months to about 2 years, about 10 months to about 1.5 years, about 10 months to about 1 year, about 1 year to about 3 years, about 1 year to about 2.5 years, about 1 year to about 2 years, about 1 year to about 1.5 years, about 1.5 years to about 3 years, about 1.5 years to about 2.5 years, about 1.5 years to about 2 years, about 2 years to about 3 years, about 2 years to about 2.5 years, or about 2.5 years to about 3 years).

[0700] In some embodiments, the risk of developing a metastasis or developing an additional metastasis over a period of time in a subject identified as having a cancer is decreased by about 1% to about 99% (e.g., or any of the subranges of this range described herein), e.g., as compared to the risk in a subject having a similar cancer receiving a different treatment or receiving no treatment.

[0701] Non-limiting examples of cancer include: acute lymphoblastic leukemia (ALL), acute myeloid leukemia (AML), adrenocortical carcinorna, anal cancer, appendix cancer, astrocytoma, basal cell carcinoma, brain tumor, bile duct cancer, bladder cancer, bone cancer, breast cancer, bronchial tumor, Burkitt Lymphoma, carcinoma of unknown primary origin, cardiac tumor, cervical cancer, chordoma, chronic lymphocytic leukemia (CLL), chronic myelogenous leukemia (CML), chronic myeloproliferative neoplasm, colon cancer, colorectal cancer, craniopharyngioma, cutaneous T-cell lymphoma, ductal carcinoma, embryonal tumor, endometrial cancer, ependymoma, esophageal cancer, esthesioneuroblastoma, fibrous histiocytoma, Ewing sarcoma, eye cancer, germ cell tumor, gallbladder cancer, gastric cancer, gastrointestinal carcinoid tumor, gastrointestinal stromal tumor, gestational trophoblastic disease, glioma, head and neck cancer, hairy cell leukemia, hepatocellular cancer, histiocytosis, Hodgkin lymphoma, hypopharyngeal cancer, intraocular melanoma, islet cell tumor, Kaposi sarcoma, kidney cancer, Langerhans cell histiocytosis, laryngeal cancer, leukemia, lip and oral cavity cancer, liver cancer, lobular carcinoma in situ, lung cancer, lymphoma, macroglobulinemia, malignant fibrous histiocytoma, melanoma, Merkel cell carcinoma, mesothelioma, metastatic squamous neck cancer with occult primary, midline tract carcinoma involving NUT gene, mouth cancer, multiple endocrine neoplasia syndrome, multiple myeloma, mycosis fungoides, myelodysplastic syndrome, myelodysplastic/myeloproliferative neoplasm, nasal cavity and para-nasal sinus cancer, nasopharyngeal cancer, neuroblastoma, non-Hodgkin lymphoma, non-small cell lung cancer, oropharyngeal cancer, osteosarcoma, ovarian cancer, pancreatic cancer, papillomatosis, paraganglioma, parathyroid cancer, penile cancer, pharyngeal cancer, pheochromocytomas, pituitary tumor, pleuropulmonary blastoma, primary central nervous system lymphoma, prostate cancer, rectal cancer, renal cell cancer, renal pelvis and ureter cancer, retinoblastoma, rhabdoid tumor, salivary gland cancer, Sezary syndrome, skin cancer, small cell lung cancer, small intestine cancer, soft tissue sarcoma, spinal cord tumor, stomach cancer, T-cell lymphoma, teratoid tumor, testicular cancer, throat cancer, thymoma and thymic carcinoma, thyroid cancer, urethral cancer, uterine cancer, vaginal cancer, vulvar cancer, and Wilms' tumor. Additional examples of cancer are known in the art.

[0702] In some embodiments, the patient is further administered one or more additional therapeutic agents (e.g., one or more of a chemotherapeutic agent, a recombinant cytokine or interleukin protein, a kinase inhibitor, and a checkpoint inhibitor). In some embodiments, the one or more additional therapeutic agents is administered to the patient at approximately the same time as any of the ABPCs described herein are administered to the patient. In some embodiments, the one or more additional therapeutic agents are administered to the patient after the administration of any of the ABPCs described herein to the patient. In some embodiments, the one or more additional therapeutic agents are administered to the patient before the administration of any of the ABPCs described herein to the patient.

[0703] In some embodiments of any of the methods described herein, the cancer is a solid cancer (e.g., breast cancer, prostate cancer, or non-small cell lung cancer).

### Compositions

[0704] Also provided herein are compositions (e.g., pharmaceutical compositions) that include at least one of any of the ABPCs described herein. In some embodiments, the compositions (e.g., pharmaceutical compositions) can be disposed in a sterile vial or a pre-loaded syringe.

[0705] In some embodiments, the compositions (e.g., pharmaceutical compositions) are formulated for different routes of administration (e.g., intravenous, subcutaneous, intramuscular, or intratumoral). In some embodiments, the compositions (e.g., pharmaceutical compositions) can include a pharmaceutically acceptable carrier (e.g., phosphate buffered saline). Single or multiple administrations of any of the pharmaceutical compositions described herein can be given to a subject depending on, for example: the dosage and frequency as required and tolerated by the patient. A dosage of the pharmaceutical composition should provide a sufficient quantity of the ABPC to effectively treat or ameliorate conditions, diseases, or symptoms.

[0706] Also provided herein are methods of treating a subject having a cancer (e.g., any of the cancers described herein) that include administering a therapeutically effective amount of at least one of any of the compositions or pharmaceutical compositions provided herein.

### Kits

[0707] Also provided herein are kits that include any of the ABPCs described herein, any of the compositions described herein, or any of the pharmaceutical compositions described herein. In some embodiments, the kits can include instructions for performing any of the methods described herein. In some embodiments, the kits can include at least one dose of any of the compositions (e.g., pharmaceutical compositions) described herein. In some embodiments, the kits can provide a syringe for administering any of the pharmaceutical compositions described herein.

### Protein Constructs

[0708] Also provided are protein constructs (PCs) that include: a first antigen-binding domain that is capable of specifically binding DLL3 or an epitope of DLL3 presented on the surface of a target mammalian cell, where: (a) the dissociation rate of the first antigen-binding domain at a pH of about 7.0 to about 8.0 (or any of the subranges of this range described herein) is faster than the dissociation rate at a pH of about 4.0 to about 6.5 (or any of the subranges of this range described herein); and/or (b) the dissociation constant (K_{D}) of the first antigen-binding domain at a pH of about 7.0 to about 8.0 (or any of the subranges of this range) is greater than the K_{D} at a pH of about 4.0 to about 6.5.

[0709] Also provided herein are pharmaceutical compositions including any of the PCs described herein. Also provided herein are methods of treating a subject in need thereof that include administering a therapeutically effective amount of any of the PCs described herein to the subject.

### Methods of Improving pH Dependence of an Antigen-Binding Protein Construct

[0710] Also provided herein are methods of improving pH dependence of an antigen-binding protein construct, the method comprises providing a starting antigen-binding protein construct comprising an antigen-binding domain and introducing one or more histidine amino acid substitutions into one or more CDRs of the antigen-binding domain in the starting antigen-binding protein construct, wherein the method results in the generation of an antigen-binding protein construct having one or both of: (a) an increased (e.g., at least a 0.1-fold increase to about a 100-fold increase, or any of the subranges of this range described herein) ratio of the dissociation rate of the antigen-binding domain at a pH of about 4.0 to about 6.5 to the dissociation rate at a pH of about 7.0 to about 8.0, as compared to the starting antigen-binding protein construct, and (b) an increased (e.g., at least a 0.1-fold increase to about a 100-fold increase, or any of the subranges of this range described herein) ratio the dissociation constant (K_{D}) of the antigen-binding domain at a pH of about 4.0 to about 6.5 to the K_{D} at a pH of about 7.0 to about 8.0, as compared to the starting antigen-binding protein construct.

### Exemplary Embodiments

[0711] Embodiment 1 is a pharmaceutical composition comprising an effective amount of an antigen-binding protein construct (ABPC) comprising: a first antigen-binding domain that is capable of specifically binding DLL3 or an epitope of DLL3 presented on the surface of a target mammalian cell, wherein: (a) the dissociation rate of the first antigen-binding domain at a pH of about 4.0 to about 6.5 is faster than the dissociation rate at a pH of about 7.0 to about 8.0 or (b) the dissociation constant (KD) of the first antigen-binding domain at a pH of about 4.0 to about 6.5 is greater than the KD at a pH of about 7.0 to about 8.0.

[0712] Embodiment 2 is the pharmaceutical composition of embodiment 1, wherein the first antigen-binding domain comprises a heavy chain variable domain of rovalpituzumab with one or more amino acids substituted with a histidine.

[0713] Embodiment 3 is the pharmaceutical composition of embodiment 1, wherein the first antigen-binding domain comprises a light chain variable domain of rovalpituzumab with one or more amino acids substituted with a histidine.

[0714] Embodiment 4 is the pharmaceutical composition of embodiment 1, wherein the first antigen-binding domain comprises: a heavy chain variable domain of rovalpituzumab with one or more amino acids substituted with a histidine; and a light chain variable domain of rovalpituzumab with one or more amino acids substituted with a histidine.

[0715] Embodiment 5 is the pharmaceutical composition of embodiment 2 or 4, wherein the heavy chain variable domain of rovalpituzumab comprises SEQ ID NO: 1.

[0716] Embodiment 6 is the pharmaceutical composition of embodiment 3 or 4, wherein the light chain variable domain of rovalpituzumab comprises SEQ ID NO: 2.

[0717] Embodiment 7 is the pharmaceutical composition of embodiment 1, wherein the first antigen-binding domain comprises a heavy chain variable domain comprising a CDR1, a CDR2, and a CDR3 of SEQ ID NOs: 3-5, respectively, with collectively a total of one or more amino acid positions in SEQ ID NOs: 3-5 substituted with a histidine.

[0718] Embodiment 8 is the pharmaceutical composition of embodiment 1, wherein the first DLL3-binding domain comprises a light chain variable domain comprising a CDR1, a CDR2, and a CDR3 of SEQ ID NOs: 6-8, respectively, with collectively a total of one or more amino acid positions in SEQ ID NOs: 6-8 substituted with a histidine.

[0719] Embodiment 9 is the pharmaceutical composition of embodiment 1, wherein the first DLL3-binding domain comprises: a heavy chain variable domain comprising a CDR1, a CDR2, and a CDR3 of SEQ ID NOs: 3-5, respectively, with collectively a total of one or more amino acid positions in SEQ ID NOs: 3-5 substituted with a histidine; and a light chain variable domain comprising a CDR1, a CDR2, and a CDR3 of SEQ ID NOs: 6-8, respectively, with collectively a total of one or more amino acid positions in SEQ ID NOs: 6-8 substituted with a histidine.

[0720] Embodiment 10 is the pharmaceutical composition of embodiment 1, 2, or 7, wherein the first antigen-binding domain comprises a heavy chain variable domain that is at least 90% identical to SEQ ID NO: 1, wherein the heavy chain variable domain includes a histidine at one or more positions in SEQ ID NO: 1 selected from the group consisting of: 27, 29, 31, 32, 34, 35, 50, 53, 54, 55, 58, 97, 98, 101, 103, 105, and 106.

[0721] Embodiment 11 is the pharmaceutical composition of embodiment 1, 3, or 8, wherein the first antigen-binding domain comprises a light chain variable domain that is at least 90% identical to SEQ ID NO: 2, wherein the light chain variable domain includes a histidine at one or more positions in SEQ ID NO: 2 selected from the group consisting of: 25, 26, 29, 32, 33, 34, 51, 54, 89, 90, 93, 94, 95, and 96.

[0722] Embodiment 12 is the pharmaceutical composition of embodiment 1, 2, or 7, wherein the first antigen-binding domain comprises a heavy chain variable domain that is at least 90% identical to SEQ ID NO: 1, wherein the heavy chain variable domain includes a histidine at two or more positions in SEQ ID NO: 1 selected from the group consisting of: 29, 31, 54, 55, and 105.

[0723] Embodiment 13 is the pharmaceutical composition of embodiment 1, 4, or 9, wherein the first antigen-binding domain comprises: a heavy chain variable domain that is at least 90% identical to SEQ ID NO: 1, wherein the heavy chain variable domain includes a histidine at one or more positions in SEQ ID NO: 1 selected from the group consisting of: 27, 29, 31, 32, 34, 35, 50, 53, 54, 55, 58, 97, 98, 101, 103, 105, and 106; and a light chain variable domain that is at least 90% identical to SEQ ID NO: 2, wherein the light chain variable domain includes a histidine at one or more positions in SEQ ID NO: 2 selected from the group consisting of: 25, 26, 29, 32, 33, 34, 51, 54, 89, 90, 93, 94, 95, and 96.

[0724] Embodiment 14 is the pharmaceutical composition of embodiment 1, wherein the first antigen-binding domain comprises a heavy chain variable domain of SEQ ID NO: 17, SEQ ID NO: 19, SEQ ID NO: 21, SEQ ID NO: 22, SEQ ID NO: 24, SEQ ID NO: 25, SEQ ID NO: 26, SEQ ID NO: 29, SEQ ID NO: 30, SEQ ID NO: 31, SEQ ID NO: 34, SEQ ID NO: 43, SEQ ID NO: 44, SEQ ID NO: 47, SEQ ID NO: 49, SEQ ID NO: 51, or SEQ ID NO: 52.

[0725] Embodiment 15 is the pharmaceutical composition of embodiment 1 or 14, wherein the first antigen-binding domain comprises a light chain variable domain of SEQ ID NO: 2, SEQ ID NO: 55, SEQ ID NO: 56, SEQ ID NO: 59, SEQ ID NO: 62, SEQ ID NO: 63, SEQ ID NO: 64, SEQ ID NO: 66, SEQ ID NO: 69, SEQ ID NO: 72, SEQ ID NO: 73, SEQ ID NO: 76, SEQ ID NO: 77, SEQ ID NO: 78, and SEQ ID NO: 79.

[0726] Embodiment 16 is the pharmaceutical composition of embodiment 1, wherein the first antigen-binding domain comprises a heavy chain variable domain SEQ ID NO: 81, SEQ ID NO: 82, SEQ ID NO: 83, SEQ ID NO: 84, SEQ ID NO: 85, SEQ ID NO: 86, SEQ ID NO: 87, SEQ ID NO: 88, SEQ ID NO: 89, SEQ ID NO: 90, and SEQ ID NO: 91.

[0727] Embodiment 17 is the pharmaceutical composition of embodiment 16, wherein the first antigen-binding domain comprises a light chain variable domain of SEQ ID NO: 2, SEQ ID NO: 55, SEQ ID NO: 56, SEQ ID NO: 59, SEQ ID NO: 62, SEQ ID NO: 63, SEQ ID NO: 64, SEQ ID NO: 66, SEQ ID NO: 69, SEQ ID NO: 72, SEQ ID NO: 73, SEQ ID NO: 76, SEQ ID NO: 77, SEQ ID NO: 78, and SEQ ID NO: 79.

[0728] Embodiment 18 is the pharmaceutical composition of any one of embodiments 1-17, wherein the ABPC is degraded in the target mammalian cell following internalization of the ABPC by the target mammalian cell.

[0729] Embodiment 19 is the pharmaceutical composition of any one of embodiments 1-18, wherein the ABPC further comprises a conjugated toxin, radioisotope, drug, or small molecule.

[0730] Embodiment 20 is the pharmaceutical composition of embodiment 19, wherein the composition provides for an increase in toxin liberation in the target mammalian cell as compared to a composition comprising the same amount of a control ABPC.

[0731] Embodiment 21 is the pharmaceutical composition of embodiment 20, wherein the composition provides for at least a 20% increase in toxin liberation in the target mammalian cell as compared to a composition comprising the same amount of a control ABPC.

[0732] Embodiment 22 is the pharmaceutical composition of embodiment 21, wherein the composition provides for at least a 50% increase in toxin liberation in the target mammalian cell as compared to a composition comprising the same amount of a control ABPC.

[0733] Embodiment 23 is the pharmaceutical composition of embodiment 20, wherein the composition provides for at least a 2-fold increase in toxin liberation in the target mammalian cell as compared to a composition comprising the same amount of a control ABPC.

[0734] Embodiment 24 is the pharmaceutical composition of embodiment 23, wherein the composition provides for at least a 5-fold increase in toxin liberation in the target mammalian cell as compared to a composition comprising the same amount of a control ABPC.

[0735] Embodiment 25 is the pharmaceutical composition of any one of embodiments 19-24, wherein the composition provides for an increase in target mammalian cell killing as compared to a composition comprising the same amount of a control ABPC.

[0736] Embodiment 26 is the pharmaceutical composition of embodiment 25, wherein the composition provides for at least a 20% increase in target mammalian cell killing as compared to a composition comprising the same amount of a control ABPC.

[0737] Embodiment 27 is the pharmaceutical composition of embodiment 26, wherein the composition provides for at least a 50% increase in target mammalian cell killing as compared to a composition comprising the same amount of a control ABPC.

[0738] Embodiment 28 is the pharmaceutical composition of embodiment 25, wherein the composition provides for at least a 2-fold increase in target mammalian cell killing as compared to a composition comprising the same amount of a control ABPC.

[0739] Embodiment 29 is the pharmaceutical composition of embodiment 28, wherein the composition provides for at least a 5-fold increase in target mammalian cell killing as compared to a composition comprising the same amount of a control ABPC.

[0740] Embodiment 30 is the pharmaceutical composition of any one of embodiments 1-29, wherein the composition provides for an increase in endolysosomal delivery in the target mammalian cell as compared to a composition comprising the same amount of a control ABPC.

[0741] Embodiment 31 is the pharmaceutical composition of embodiment 30, wherein the composition provides for at least a 20% increase in endolysosomal delivery in the target mammalian cell as compared to a composition comprising the same amount of a control ABPC.

[0742] Embodiment 32 is the pharmaceutical composition of embodiment 31, wherein the composition provides for at least a 50% increase in endolysosomal delivery in the target mammalian cell as compared to a composition comprising the same amount of a control ABPC.

[0743] Embodiment 33 is the pharmaceutical composition of embodiment 30, wherein the composition provides for at least a 2-fold increase in endolysosomal delivery in the target mammalian cell as compared to a composition comprising the same amount of a control ABPC.

[0744] Embodiment 34 is the pharmaceutical composition of embodiment 33, wherein the composition provides for at least a 5-fold increase in endolysosomal delivery in the target mammalian cell as compared to a composition comprising the same amount of a control ABPC.

[0745] Embodiment 35 is the pharmaceutical composition of any one of embodiments 1-34, wherein the composition results in a less of a reduction in the level of DLL3 presented on the surface of the target mammalian cell as compared to a composition comprising the same amount of a control ABPC.

[0746] Embodiment 36 is the pharmaceutical composition of any one of embodiments 1-34, wherein the composition does not result in a detectable reduction in the level of the DLL3 presented on the surface of the target mammalian cell.

[0747] Embodiment 37 is a pharmaceutical composition comprising an effective amount of an antigen-binding protein construct (ABPC) comprising: a first antigen-binding domain that is capable of specifically binding DLL3 or an epitope of DLL3 presented on the surface of a target mammalian cell; and a conjugated toxin, radioisotope, drug, or small molecule, wherein: (a) the dissociation rate of the first antigen-binding domain at a pH of about 4.0 to about 6.5 is faster than the dissociation rate at a pH of about 7.0 to about 8.0; or the dissociation constant (KD) of the first antigen-binding domain at a pH of about 4.0 to about 6.5 is greater than the KD at a pH of about 7.0 to about 8.0; and (b) the composition provides for one or more of: an increase in toxin liberation in the target mammalian cell as compared to a composition comprising the same amount of a control ABPC; an increase in target mammalian cell killing as compared to a composition comprising the same amount of a control ABPC; and an increase in endolysosomal delivery in the target mammalian cell as compared to a composition comprising the same amount of a control ABPC.

[0748] Embodiment 38 is the pharmaceutical composition of embodiment 37, wherein the first antigen-binding domain comprises a heavy chain variable domain of rovalpituzumab with one or more amino acids substituted with a histidine.

[0749] Embodiment 39 is the pharmaceutical composition of embodiment 37, wherein the first antigen-binding domain comprises a light chain variable domain of rovalpituzumab with one or more amino acids substituted with a histidine.

[0750] Embodiment 40 is the pharmaceutical composition of embodiment 37, wherein the first antigen-binding domain comprises: a heavy chain variable domain of rovalpituzumab with one or more amino acids substituted with a histidine; and a light chain variable domain of rovalpituzumab with one or more amino acids substituted with a histidine.

[0751] Embodiment 41 is the pharmaceutical composition of embodiment 38 or 40, wherein the heavy chain variable domain of rovalpituzumab comprises SEQ ID NO: 1.

[0752] Embodiment 42 is the pharmaceutical composition of embodiment 39 or 40, wherein the light chain variable domain of rovalpituzumab comprises SEQ ID NO: 2.

[0753] Embodiment 43 is the pharmaceutical composition of embodiment 37, wherein the first antigen-binding domain comprises a heavy chain variable domain comprising a CDR1, a CDR2, and a CDR3 of SEQ ID NOs: 3-5, respectively, with collectively a total of one or more amino acid positions in SEQ ID NOs: 3-5 substituted with a histidine.

[0754] Embodiment 44 is the pharmaceutical composition of embodiment 37, wherein the first DLL3-binding domain comprises a light chain variable domain comprising a CDR1, a CDR2, and a CDR3 of SEQ ID NOs: 6-8, respectively, with collectively a total of one or more amino acid positions in SEQ ID NOs: 6-8 substituted with a histidine.

[0755] Embodiment 45 is the pharmaceutical composition of embodiment 37, wherein the first DLL3-binding domain comprises: a heavy chain variable domain comprising a CDR1, a CDR2, and a CDR3 of SEQ ID NOs: 3-5, respectively, with collectively a total of one or more amino acid positions in SEQ ID NOs: 3-5 substituted with a histidine; and a light chain variable domain comprising a CDR1, a CDR2, and a CDR3 of SEQ ID NOs: 6-8, respectively, with collectively a total of one or more amino acid positions in SEQ ID NOs: 6-8 substituted with a histidine.

[0756] Embodiment 46 is the pharmaceutical composition of embodiment 37, 38, or 43, wherein the first antigen-binding domain comprises a heavy chain variable domain that is at least 90% identical to SEQ ID NO: 1, wherein the heavy chain variable domain includes a histidine at one or more positions in SEQ ID NO: 1 selected from the group consisting of: 27, 29, 31, 32, 34, 35, 50, 53, 54, 55, 58, 97, 98, 101, 103, 105, and 106.

[0757] Embodiment 47 is the pharmaceutical composition of embodiment 37, 39, or 44, wherein the first antigen-binding domain comprises a light chain variable domain that is at least 90% identical to SEQ ID NO: 2, wherein the light chain variable domain includes a histidine at one or more positions in SEQ ID NO: 2 selected from the group consisting of: 25, 26, 29, 32, 33, 34, 51, 54, 89, 90, 93, 94, 95, and 96.

[0758] Embodiment 48 is the pharmaceutical composition of embodiment 37, 38, or 43, wherein the first antigen-binding domain comprises a heavy chain variable domain that is at least 90% identical to SEQ ID NO: 1, wherein the heavy chain variable domain includes a histidine at two or more positions in SEQ ID NO: 1 selected from the group consisting of: 29, 31, 54, 55, 105.

[0759] Embodiment 49 is the pharmaceutical composition of embodiment 37, 40, or 45, wherein the first antigen-binding domain comprises: a heavy chain variable domain that is at least 90% identical to SEQ ID NO: 1, wherein the heavy chain variable domain includes a histidine at one or more positions in SEQ ID NO: 1 selected from the group consisting of: 27, 29, 31, 32, 34, 35, 50, 53, 54, 55, 58, 97, 98, 101, 103, 105, and 106; and a light chain variable domain that is at least 90% identical to SEQ ID NO: 2, wherein the light chain variable domain includes a histidine at one or more positions in SEQ ID NO: 2 selected from the group consisting of: 25, 26, 29, 32, 33, 34, 51, 54, 89, 90, 93, 94, 95, and 96.

[0760] Embodiment 50 is the pharmaceutical composition of embodiment 37, wherein the first antigen-binding domain comprises a heavy chain variable domain of SEQ ID NO: 17, SEQ ID NO: 19, SEQ ID NO: 21, SEQ ID NO: 22, SEQ ID NO: 24, SEQ ID NO: 25, SEQ ID NO: 26, SEQ ID NO: 29, SEQ ID NO: 30, SEQ ID NO: 31, SEQ ID NO: 34, SEQ ID NO: 43, SEQ ID NO: 44, SEQ ID NO: 47, SEQ ID NO: 49, SEQ ID NO: 51, or SEQ ID NO: 52.

[0761] Embodiment 51 is the pharmaceutical composition of embodiment 37 or 50, wherein the first antigen-binding domain comprises a light chain variable domain of SEQ ID NO: 2, SEQ ID NO: 55, SEQ ID NO: 56, SEQ ID NO: 59, SEQ ID NO: 62, SEQ ID NO: 63, SEQ ID NO: 64, SEQ ID NO: 66, SEQ ID NO: 69, SEQ ID NO: 72, SEQ ID NO: 73, SEQ ID NO: 76, SEQ ID NO: 77, SEQ ID NO: 78, and SEQ ID NO: 79.

[0762] Embodiment 52 is the pharmaceutical composition of embodiment 37, wherein the first antigen-binding domain comprises a heavy chain variable domain of SEQ ID NO: 81, SEQ ID NO: 82, SEQ ID NO: 83, SEQ ID NO: 84, SEQ ID NO: 85, SEQ ID NO: 86, SEQ ID NO: 87, SEQ ID NO: 88, SEQ ID NO: 89, SEQ ID NO: 90, and SEQ ID NO: 91.

[0763] Embodiment 53 is the pharmaceutical composition of embodiment 52, wherein the first antigen-binding domain comprises a light chain variable domain of SEQ ID NO: 2, SEQ ID NO: 55, SEQ ID NO: 56, SEQ ID NO: 59, SEQ ID NO: 62, SEQ ID NO: 63, SEQ ID NO: 64, SEQ ID NO: 66, SEQ ID NO: 69, SEQ ID NO: 72, SEQ ID NO: 73, SEQ ID NO: 76, SEQ ID NO: 77, SEQ ID NO: 78, and SEQ ID NO: 79.

[0764] Embodiment 54 is the pharmaceutical composition of any one of embodiments 37-53, wherein the composition provides for an increase in toxin liberation in the target mammalian cell as compared to a composition comprising the same amount of a control ABPC.

[0765] Embodiment 55 is the pharmaceutical composition of embodiment 54, wherein the composition provides for at least a 20% increase in toxin liberation in the target mammalian cell as compared to a composition comprising the same amount of a control ABPC.

[0766] Embodiment 56 is the pharmaceutical composition of embodiment 55, wherein the composition provides for at least a 50% increase in toxin liberation in the target mammalian cell as compared to a composition comprising the same amount of a control ABPC.

[0767] Embodiment 57 is the pharmaceutical composition of embodiment 54, wherein the composition provides for at least a 2-fold increase in toxin liberation in the target mammalian cell as compared to a composition comprising the same amount of a control ABPC.

[0768] Embodiment 58 is the pharmaceutical composition of embodiment 57, wherein the composition provides for at least a 5-fold increase in toxin liberation in the target mammalian cell as compared to a composition comprising the same amount of a control ABPC.

[0769] Embodiment 59 is the pharmaceutical composition of any one of embodiments 37-58, wherein the composition provides for an increase in target mammalian cell killing as compared to a composition comprising the same amount of a control ABPC.

[0770] Embodiment 60 is the pharmaceutical composition of embodiment 59, wherein the composition provides for at least a 20% increase in target mammalian cell killing as compared to a composition comprising the same amount of a control ABPC.

[0771] Embodiment 61 is the pharmaceutical composition of embodiment 60, wherein the composition provides for at least a 50% increase in target mammalian cell killing as compared to a composition comprising the same amount of a control ABPC.

[0772] Embodiment 62 is the pharmaceutical composition of embodiment 59, wherein the composition provides for at least a 2-fold increase in target mammalian cell killing as compared to a composition comprising the same amount of a control ABPC.

[0773] Embodiment 63 is the pharmaceutical composition of embodiment 62, wherein the composition provides for at least a 5-fold increase in target mammalian cell killing as compared to a composition comprising the same amount of a control ABPC.

[0774] Embodiment 64 is the pharmaceutical composition of any one of embodiments 37-63, wherein the composition provides for an increase in endolysosomal delivery in the target mammalian cell as compared to a composition comprising the same amount of a control ABPC.

[0775] Embodiment 65 is the pharmaceutical composition of embodiment 64, wherein the composition provides for at least a 20% increase in endolysosomal delivery in the target mammalian cell as compared to a composition comprising the same amount of a control ABPC.

[0776] Embodiment 66 is the pharmaceutical composition of embodiment 65, wherein the composition provides for at least a 50% increase in endolysosomal delivery in the target mammalian cell as compared to a composition comprising the same amount of a control ABPC.

[0777] Embodiment 67 is the pharmaceutical composition of embodiment 64, wherein the composition provides for at least a 2-fold increase in endolysosomal delivery in the target mammalian cell as compared to a composition comprising the same amount of a control ABPC.

[0778] Embodiment 68 is the pharmaceutical composition of embodiment 67, wherein the composition provides for at least a 5-fold increase in endolysosomal delivery in the target mammalian cell as compared to a composition comprising the same amount of a control ABPC.

[0779] Embodiment 69 is the pharmaceutical composition of any one of embodiments 37-68, wherein the composition results in a less of a reduction in the level of DLL3 presented on the surface of the target mammalian cell as compared to a composition comprising the same amount of a control ABPC.

[0780] Embodiment 70 is the pharmaceutical composition of any one of embodiments 37-68, wherein the composition does not result in a detectable reduction in the level of the DLL3 presented on the surface of the target mammalian cell.

[0781] Embodiment 71 is the pharmaceutical composition of any one of embodiments 1-70, wherein the target mammalian cell is a cancer cell.

[0782] Embodiment 72 is the pharmaceutical composition of any one of embodiments 1-71, wherein the dissociation rate of the antigen-binding domain at a pH of about 4.0 to about 6.5 is at least 10% faster than the dissociation rate of the antigen-binding domain at a pH of about 7.0 to about 8.0.

[0783] Embodiment 73 is the pharmaceutical composition of any one of embodiments 1-71, wherein the dissociation rate of the antigen-binding domain at a pH of about 4.0 to about 6.5 is at least 3-fold faster than the dissociation rate of the antigen-binding domain at a pH of about 7.0 to about 8.0.

[0784] Embodiment 74 is the pharmaceutical composition of any one of embodiments 1-71, wherein the dissociation rate of the antigen-binding domain at a pH of about 4.0 to about 6.5 is at least 10-fold faster than the dissociation rate of the antigen-binding domain at a pH of about 7.0 to about 8.0.

[0785] Embodiment 75 is the pharmaceutical composition of any one of embodiments 1-74, wherein the KD of the antigen-binding domain at a pH of about 4.0 to about 6.5 is at least 10% greater than the KD of the antigen-binding domain at a pH of about 7.0 to about 8.0.

[0786] Embodiment 76 is the pharmaceutical composition of any one of embodiments 1-74, wherein the KD of the antigen-binding domain at a pH of about 4.0 to about 6.5 is at least 3-fold greater than the KD of the antigen-binding domain at a pH of about 7.0 to about 8.0.

[0787] Embodiment 77 is the pharmaceutical composition of any one of embodiments 1-74, wherein the KD of the antigen-binding domain at a pH of about 4.0 to about 6.5 is at least 10-fold greater than the KD of the antigen-binding domain at a pH of about 7.0 to about 8.0.

[0788] Embodiment 78 is the pharmaceutical composition of any one of embodiments 1-77, wherein the ABPC is cytotoxic or cytostatic to the target mammalian cell.

[0789] Embodiment 79 is the pharmaceutical composition of any one of embodiments 1-78, wherein the ABPC is cross-reactive with a non-human primate DLL3 and human DLL3.

[0790] Embodiment 80 is the pharmaceutical composition of any one of embodiments 1-78, wherein the ABPC is cross-reactive with a non-human primate DLL3, a human DLL3, and one or both of rat DLL3 and a mouse DLL3.

[0791] Embodiment 81 is the pharmaceutical composition of embodiment 80, wherein the ABPC is cross-reactive with a non-human primate DLL3, a human DLL3, a rat DLL3, and a mouse DLL3.

[0792] Embodiment 82 is the pharmaceutical composition of any one of embodiments 1-81, wherein the antigen-binding domain binds to an epitope of DLL3 that is present on the surface of cells from an Old World Monkey.

[0793] Embodiment 83 is the pharmaceutical composition of any one of embodiments 1-82, wherein the ABPC comprises a single polypeptide.

[0794] Embodiment 84 is the pharmaceutical composition of embodiment 83, wherein the antigen-binding domain is selected from the group consisting of. a VH domain, a VHH domain, a VNAR domain, and a scFv.

[0795] Embodiment 85 is the pharmaceutical composition of embodiment 83 or 84, wherein the ABPC is a BiTe, a (scFv)2, a nanobody, a nanobody-HSA, a DART, a TandAb, a scDiabody, a scDiabody-CH3, scFv-CH-CL-scFv, a HSAbody, scDiabody-HSA, or a tandem-scFv.

[0796] Embodiment 86 is the pharmaceutical composition of any one of embodiments 1-82, wherein the ABPC comprises two or more polypeptides.

[0797] Embodiment 87 is the pharmaceutical composition of embodiment 86, wherein the ABPC is selected from the group of an antibody, a VHH-scAb, a VHH-Fab, a Dual scFab, a F(ab′)2, a diabody, a crossMab, a DAF (two-in-one), a DAF (four-in-one), a DutaMab, a DT-IgG, a knobs-in-holes common light chain, a knobs-in-holes assembly, a charge pair, a Fab-arm exchange, a SEEDbody, a LUZ-Y, a Fcab, a κλ-body, an orthogonal Fab, a DVD-IgG, a IgG(H)-scFv, a scFv-(H)IgG, IgG(L)-scFv, scFv-(L)IgG, IgG(L,H)-Fv, IgG(H)-V, V(H)—IgG, IgG(L)-V, V(L)-IgG, KIH IgG-scFab, 2scFv-IgG, IgG-2scFv, scFv4-Ig, Zybody, DVI-IgG, Diabody-CH3, a triple body, a miniantibody, a minibody, a TriBi minibody, scFv-CH3 KIH, Fab-scFv, a F(ab′)2-scFv2, a scFv-KIH, a Fab-scFv-Fc, a tetravalent HCAb, a scDiabody-Fc, a Diabody-Fc, a tandem scFv-Fc, a VHH-Fc, a tandem VHH-Fc, a VHH-Fc KiH, a Fab-VHH-Fc, an Intrabody, a dock and lock, an ImmTAC, an IgG-IgG conjugate, a Cov-X-Body, a scFv1-PEG-scFv2, an Adnectin, a DARPin, a fibronectin, and a DEP conjugate.

[0798] Embodiment 88 is the pharmaceutical composition of any one of embodiments 19-87, wherein at least one polypeptide of the ABPC is conjugated to the toxin, the radioisotope, the drug, or the small molecule via a cleavable linker.

[0799] Embodiment 89 is the pharmaceutical composition of any one of embodiments 19-87, wherein at least one polypeptide of the ABPC is conjugated to the toxin, the radioisotope, the drug, or the small molecule via a non-cleavable linker.

[0800] Embodiment 90 is the pharmaceutical composition of any of embodiments 1-89, wherein the half-life of the ABPC in vivo is decreased as compared to the half-life of a control ABPC in vivo.

[0801] Embodiment 91 is the pharmaceutical composition of embodiment 90, wherein the half-life of the ABPC in vivo is decreased about 5% to about 95% as compared to the half-life of a control ABPC in vivo.

[0802] Embodiment 92 is the pharmaceutical composition of embodiment 90, wherein the half-life of the ABPC in vivo is decreased about 10% to about 95% as compared to the half-life of a control ABPC in vivo.

[0803] Embodiment 93 is the pharmaceutical composition of embodiment 90, wherein the half-life of the ABPC in vivo is decreased about 30% to about 95% as compared to the half-life of a control ABPC in vivo.

[0804] Embodiment 94 is the pharmaceutical composition of embodiment 90, wherein the half-life of the ABPC in vivo is decreased about 50% to about 95% as compared to the half-life of a control ABPC in vivo.

[0805] Embodiment 95 is the pharmaceutical composition of embodiment 90, wherein the half-life of the ABPC in vivo is decreased about 70% to about 95% as compared to the half-life of a control ABPC in vivo.

[0806] Embodiment 96 is the pharmaceutical composition of any one of embodiments 20-95, wherein the control ABPC is capable of specifically binding to DLL3 or an epitope of DLL3 presented on the surface of a target mammalian cell, wherein: (a) the control ABPC comprises a first antigen-binding domain: (b) the dissociation rate of the first antigen-binding domain of the control ABPC at a pH of about 4.0 to about 6.5 is no more than 3-fold faster than the dissociation rate at a pH of about 7.0 to about 8.0; and (c) the dissociation constant (KD) of the first antigen-binding domain of the control ABPC at a pH of about 4.0 to about 6.5 is no more than 3-fold greater than the KD at a pH of about 7.0 to about 8.0.

[0807] Embodiment 97 is the pharmaceutical composition of any one of embodiments 20-95, wherein the control ABPC is capable of specifically binding to DLL3 or an epitope of DLL3 presented on the surface of a target mammalian cell, wherein: (a) the control ABPC comprises a first antigen-binding domain; (b) the dissociation rate of the first antigen-binding domain of the control ABPC at a pH of about 4.0 to about 6.5 is no more than 2-fold faster than the dissociation rate at a pH of about 7.0 to about 8.0; and (c) the dissociation constant (KD) of the first antigen-binding domain of the control ABPC at a pH of about 4.0 to about 6.5 is no more than 2-fold greater than the KD at a pH of about 7.0 to about 8.0.

[0808] Embodiment 98 is the pharmaceutical composition of any one of embodiments 20-95, wherein the control ABPC is capable of specifically binding to DLL3 or an epitope of DLL3 presented on the surface of a target mammalian cell, wherein: (a) the control ABPC comprises a first antigen-binding domain; (b) the dissociation rate of the first antigen-binding domain of the control ABPC at a pH of about 4.0 to about 6.5 is no more than 1-fold faster than the dissociation rate at a pH of about 7.0 to about 8.0; and (c) the dissociation constant (KD) of the first antigen-binding domain of the control ABPC at a pH of about 4.0 to about 6.5 is no more than 1-fold greater than the KD at a pH of about 7.0 to about 8.0.

[0809] Embodiment 99 is the pharmaceutical composition of any one of embodiments 20-95, wherein the control ABPC is rovalpituzumab.

[0810] Embodiment 100 is the pharmaceutical composition of any one of embodiments 1-99, wherein the ABPC further comprises a second antigen-binding domain.

[0811] Embodiment 101 is a kit comprising at least one dose of the pharmaceutical composition of any one of embodiments 1-100.

[0812] Embodiment 102 is an antigen-binding protein construct (ABPC) comprising: a first antigen-binding domain that is capable of specifically binding DLL3 or an epitope of DLL3 presented on the surface of a target mammalian cell, wherein: (a) the dissociation rate of the first antigen-binding domain at a pH of about 4.0 to about 6.5 is faster than the dissociation rate at a pH of about 7.0 to about 8.0; or (b) the dissociation constant (KD) of the first antigen-binding domain at a pH of about 4.0 to about 6.5 is greater than the KD at a pH of about 7.0 to about 8.0.

[0813] Embodiment 103 is the ABPC of embodiment 102, wherein the first antigen-binding domain comprises a heavy chain variable domain of rovalpituzumab with one or more amino acids substituted with a histidine.

[0814] Embodiment 104 is the ABPC of embodiment 102, wherein the first antigen-binding domain comprises a light chain variable domain of rovalpituzumab with one or more amino acids substituted with a histidine.

[0815] Embodiment 105 is the ABPC of embodiment 102, wherein the first antigen-binding domain comprises: a heavy chain variable domain of rovalpituzumab with one or more amino acids substituted with a histidine; and a light chain variable domain of rovalpituzumab with one or more amino acids substituted with a histidine.

[0816] Embodiment 106 is the ABPC of embodiment 103 or 105, wherein the heavy chain variable domain of rovalpituzumab comprises SEQ ID NO: 1.

[0817] Embodiment 107 is the ABPC of embodiment 104 or 105, wherein the light chain variable domain of rovalpituzumab comprises SEQ ID NO: 2.

[0818] Embodiment 108 is the ABPC of embodiment 102, wherein the first antigen-binding domain comprises a heavy chain variable domain comprising a CDR1, a CDR2, and a CDR3 of SEQ ID NOs: 3-5, respectively, with collectively a total of one or more amino acid positions in SEQ ID NOs: 3-5 substituted with a histidine.

[0819] Embodiment 109 is the ABPC of embodiment 102, wherein the first DLL3-binding domain comprises a light chain variable domain comprising a CDR1, a CDR2, and a CDR3 of SEQ ID NOs: 6-8, respectively, with collectively a total of one or more amino acid positions in SEQ ID NOs: 6-8 substituted with a histidine.

[0820] Embodiment 110 is the ABPC of embodiment 102, wherein the first DLL3-binding domain comprises: a heavy chain variable domain comprising a CDR1, a CDR2, and a CDR3 of SEQ ID NOs: 3-5, respectively, with collectively a total of one or more amino acid positions in SEQ ID NOs: 3-5 substituted with a histidine; and a light chain variable domain comprising a CDR1, a CDR2, and a CDR3 of SEQ ID NOs: 6-8, respectively, with collectively a total of one or more amino acid positions in SEQ ID NOs: 6-8 substituted with a histidine.

[0821] Embodiment 111 is the ABPC of embodiment 102, 103, or 108, wherein the first antigen-binding domain comprises a heavy chain variable domain that is at least 90% identical to SEQ ID NO: 1, wherein the heavy chain variable domain includes a histidine at one or more positions in SEQ ID NO: 1 selected from the group consisting of: 27, 29, 31, 32, 34, 35, 50, 53, 54, 55, 58, 97, 98, 101, 103, 105, and 106.

[0822] Embodiment 112 is the ABPC of embodiment 102, 104, or 109, wherein the first antigen-binding domain comprises a light chain variable domain that is at least 90% identical to SEQ ID NO: 2, wherein the light chain variable domain includes a histidine at one or more positions in SEQ ID NO: 2 selected from the group consisting of: 25, 26, 29, 32, 33, 34, 51, 54, 89, 90, 93, 94, 95, and 96.

[0823] Embodiment 113 is the ABPC of embodiment 102, 103, or 108, wherein the first antigen-binding domain comprises a heavy chain variable domain that is at least 90% identical to SEQ ID NO: 1, wherein the heavy chain variable domain includes a histidine at two or more positions in SEQ ID NO: 1 selected from the group consisting of: 29, 31, 54, 55, 105.

[0824] Embodiment 114 is the ABPC of embodiment 102, 105, or 110, wherein the first antigen-binding domain comprises: a heavy chain variable domain that is at least 90% identical to SEQ ID NO: 1, wherein the heavy chain variable domain includes a histidine at one or more positions in SEQ ID NO: 1 selected from the group consisting of: 27, 29, 31, 32, 34, 35, 50, 53, 54, 55, 58, 97, 98, 101, 103, 105, and 106; and a light chain variable domain that is at least 90% identical to SEQ ID NO: 2, wherein the light chain variable domain includes a histidine at one or more positions in SEQ ID NO: 2 selected from the group consisting of: 25, 26, 29, 32, 33, 34, 51, 54, 89, 90, 93, 94, 95, and 96.

[0825] Embodiment 115 is the ABPC of embodiment 102, wherein the first antigen-binding domain comprises a heavy chain variable domain of SEQ ID NO: 17, SEQ ID NO: 19, SEQ ID NO: 21, SEQ ID NO: 22, SEQ ID NO: 24, SEQ ID NO: 25, SEQ ID NO: 26, SEQ ID NO: 29, SEQ ID NO: 30, SEQ ID NO: 31, SEQ ID NO: 34, SEQ ID NO: 43, SEQ ID NO: 44, SEQ ID NO: 47, SEQ ID NO: 49, SEQ ID NO: 51, or SEQ ID NO: 52.

[0826] Embodiment 116 is the ABPC of embodiment 102 or 115, wherein the first antigen-binding domain comprises a light chain variable domain of SEQ ID NO: 2, SEQ ID NO: 55, SEQ ID NO: 56, SEQ ID NO: 59, SEQ ID NO: 62, SEQ ID NO: 63, SEQ ID NO: 64, SEQ ID NO: 66, SEQ ID NO: 69, SEQ ID NO: 72, SEQ ID NO: 73, SEQ ID NO: 76, SEQ ID NO: 77, SEQ ID NO: 78, and SEQ ID NO: 79.

[0827] Embodiment 117 is the ABPC of embodiment 102, wherein the first antigen-binding domain comprises a heavy chain variable domain of SEQ ID NO: 81, SEQ ID NO: 82, SEQ ID NO: 83, SEQ ID NO: 84, SEQ ID NO: 85, SEQ ID NO: 86, SEQ ID NO: 87, SEQ ID NO: 88, SEQ ID NO: 89, SEQ ID NO: 90, or SEQ ID NO: 91.

[0828] Embodiment 118 is the ABPC of embodiment 117, wherein the first antigen-binding domain comprises a light chain variable domain of SEQ ID NO: 2, SEQ ID NO: 55, SEQ ID NO: 56, SEQ ID NO: 59, SEQ ID NO: 62, SEQ ID NO: 63, SEQ ID NO: 64, SEQ ID NO: 66, SEQ ID NO: 69, SEQ ID NO: 72, SEQ ID NO: 73, SEQ ID NO: 76, SEQ ID NO: 77, SEQ ID NO: 78, and SEQ ID NO: 79.

[0829] Embodiment 119 is the ABPC of any one of embodiments 102-118, wherein the ABPC is degraded in the target mammalian cell following internalization of the ABPC by the target mammalian cell.

[0830] Embodiment 120 is the ABPC of any one of embodiments 102-119, wherein the ABPC further comprises a conjugated toxin, radioisotope, drug, or small molecule.

[0831] Embodiment 121 is the ABPC of embodiment 120, wherein a composition comprising the ABPC provides for an increase in toxin liberation in the target mammalian cell as compared to a composition comprising the same amount of a control ABPC.

[0832] Embodiment 122 is the ABPC of embodiment 121, wherein a composition comprising the ABPC provides for at least a 20% increase in toxin liberation in the target mammalian cell as compared to a composition comprising the same amount of a control ABPC.

[0833] Embodiment 123 is the ABPC of embodiment 122, wherein a composition comprising the ABPC provides for at least a 50% increase in toxin liberation in the target mammalian cell as compared to a composition comprising the same amount of a control ABPC.

[0834] Embodiment 124 is the ABPC of embodiment 121, wherein a composition comprising the ABPC provides for at least a 2-fold increase in toxin liberation in the target mammalian cell as compared to a composition comprising the same amount of a control ABPC.

[0835] Embodiment 125 is the ABPC of embodiment 124, wherein a composition comprising the ABPC provides for at least a 5-fold increase in toxin liberation in the target mammalian cell as compared to a composition comprising the same amount of a control ABPC.

[0836] Embodiment 126 is the ABPC of any one of embodiments 120-125, wherein a composition comprising the ABPC provides for an increase in target mammalian cell killing as compared to a composition comprising the same amount of a control ABPC.

[0837] Embodiment 127 is the ABPC of embodiment 126, wherein a composition comprising the ABPC provides for at least a 20% increase in target mammalian cell killing as compared to a composition comprising the same amount of a control ABPC.

[0838] Embodiment 128 is the ABPC of embodiment 127, wherein a composition comprising the ABPC provides for at least a 50% increase in target mammalian cell killing as compared to a composition comprising the same amount of a control ABPC.

[0839] Embodiment 129 is the ABPC of embodiment 126, wherein a composition comprising the ABPC provides for at least a 2-fold increase in target mammalian cell killing as compared to a composition comprising the same amount of a control ABPC.

[0840] Embodiment 130 is the ABPC of embodiment 129, wherein a composition comprising the ABPC provides for at least a 5-fold increase in target mammalian cell killing as compared to a composition comprising the same amount of a control ABPC.

[0841] Embodiment 131 is the ABPC of any one of embodiments 102-130, wherein a composition comprising the ABPC provides for an increase in endolysosomal delivery in the target mammalian cell as compared to a composition comprising the same amount of a control ABPC.

[0842] Embodiment 132 is the ABPC of embodiment 131, wherein a composition comprising the ABPC provides for at least a 20% increase in endolysosomal delivery in the target mammalian cell as compared to a composition comprising the same amount of a control ABPC.

[0843] Embodiment 133 is the ABPC of embodiment 132, wherein a composition comprising the ABPC provides for at least a 50% increase in endolysosomal delivery in the target mammalian cell as compared to a composition comprising the same amount of a control ABPC.

[0844] Embodiment 134 is the ABPC of embodiment 131, wherein a composition comprising the ABPC provides for at least a 2-fold increase in endolysosomal delivery in the target mammalian cell as compared to a composition comprising the same amount of a control ABPC.

[0845] Embodiment 135 is the ABPC of embodiment 134, wherein a composition comprising the ABPC provides for at least a 5-fold increase in endolysosomal delivery in the target mammalian cell as compared to a composition comprising the same amount of a control ABPC.

[0846] Embodiment 136 is the ABPC of any one of embodiments 102-135, wherein a composition comprising the ABPC results in a less of a reduction in the level of DLL3 presented on the surface of the target mammalian cell as compared to a composition comprising the same amount of a control ABPC.

[0847] Embodiment 137 is the ABPC of any one of embodiments 102-135, wherein a composition comprising the ABPC does not result in a detectable reduction in the level of the DLL3 presented on the surface of the target mammalian cell.

[0848] Embodiment 138 is an antigen-binding protein construct (ABPC) comprising: a first antigen-binding domain that is capable of specifically binding DLL3 or an epitope of DLL3 presented on the surface of a target mammalian cell; and a conjugated toxin, radioisotope, drug, or small molecule, wherein: (a) the dissociation rate of the first antigen-binding domain at a pH of about 4.0 to about 6.5 is faster than the dissociation rate at a pH of about 7.0 to about 8.0; or the dissociation constant (KD) of the first antigen-binding domain at a pH of about 4.0 to about 6.5 is greater than the KD at a pH of about 7.0 to about 8.0; and (b) the composition provides for one or more of: an increase in toxin liberation in the target mammalian cell as compared to a composition comprising the same amount of a control ABPC; an increase in target mammalian cell killing as compared to a composition comprising the same amount of a control ABPC; and an increase in endolysosomal delivery in the target mammalian cell as compared to a composition comprising the same amount of a control ABPC.

[0849] Embodiment 139 is the ABPC of embodiment 138, wherein the first antigen-binding domain comprises a heavy chain variable domain of rovalpituzumab with one or more amino acids substituted with a histidine.

[0850] Embodiment 140 is the ABPC of embodiment 138, wherein the first antigen-binding domain comprises a light chain variable domain of rovalpituzumab with one or more amino acids substituted with a histidine.

[0851] Embodiment 141 is the ABPC of embodiment 138, wherein the first antigen-binding domain comprises: a heavy chain variable domain of rovalpituzumab with one or more amino acids substituted with a histidine; and a light chain variable domain of rovalpituzumab with one or more amino acids substituted with a histidine.

[0852] Embodiment 142 is the ABPC of embodiment 139 or 141, wherein the heavy chain variable domain of rovalpituzumab comprises SEQ ID NO: 1.

[0853] Embodiment 143 is the ABPC of embodiment 140 or 141, wherein the light chain variable domain of rovalpituzumab comprises SEQ ID NO: 2.

[0854] Embodiment 144 is the ABPC of embodiment 138, wherein the first antigen-binding domain comprises a heavy chain variable domain comprising a CDR1, a CDR2, and a CDR3 of SEQ ID NOs: 3-5, respectively, with collectively a total of one or more amino acid positions in SEQ ID NOs: 3-5 substituted with a histidine.

[0855] Embodiment 145 is the ABPC of embodiment 138, wherein the first DLL3-binding domain comprises a light chain variable domain comprising a CDR1, a CDR2, and a CDR3 of SEQ ID NOs: 6-8, respectively, with collectively a total of one or more amino acid positions in SEQ ID NOs: 6-8 substituted with a histidine.

[0856] Embodiment 146 is the ABPC of embodiment 138, wherein the first DLL3-binding domain comprises: a heavy chain variable domain comprising a CDR1, a CDR2, and a CDR3 of SEQ ID NOs: 3-5, respectively, with collectively a total of one or more amino acid positions in SEQ ID NOs: 3-5 substituted with a histidine; and a light chain variable domain comprising a CDR1, a CDR2, and a CDR3 of SEQ ID NOs: 6-8, respectively, with collectively a total of one or more amino acid positions in SEQ ID NOs: 6-8 substituted with a histidine.

[0857] Embodiment 147 is the ABPC of embodiment 138, 139, or 144, wherein the first antigen-binding domain comprises a heavy chain variable domain that is at least 90% identical to SEQ ID NO: 1, wherein the heavy chain variable domain includes a histidine at one or more positions in SEQ ID NO: 1 selected from the group consisting of: 27, 29, 31, 32, 34, 35, 50, 53, 54, 55, 58, 97, 98, 101, 103, 105, and 106.

[0858] Embodiment 148 is the ABPC of embodiment 138, 140, or 145, wherein the first antigen-binding domain comprises a light chain variable domain that is at least 90% identical to SEQ ID NO: 2, wherein the light chain variable domain includes a histidine at one or more positions in SEQ ID NO: 2 selected from the group consisting of: 25, 26, 29, 32, 33, 34, 51, 54, 89, 90, 93, 94, 95, and 96.

[0859] Embodiment 149 is the ABPC of embodiment 138, 139, or 144, wherein the first antigen-binding domain comprises a heavy chain variable domain that is at least 90% identical to SEQ ID NO: 1, wherein the heavy chain variable domain includes a histidine at two more positions in SEQ ID NO: 1 selected from the group consisting of: 29, 31, 54, 55, and 105.

[0860] Embodiment 150 is the ABPC of embodiment 138, 141, or 146, wherein the first antigen-binding domain comprises: a heavy chain variable domain that is at least 90% identical to SEQ ID NO: 1, wherein the heavy chain variable domain includes a histidine at one or more positions in SEQ ID NO: 1 selected from the group consisting of: 27, 29, 31, 32, 34, 35, 50, 53, 54, 55, 58, 97, 98, 101, 103, 105, and 106; and a light chain variable domain that is at least 90% identical to SEQ ID NO: 2, wherein the light chain variable domain includes a histidine at one or more positions in SEQ ID NO: 2 selected from the group consisting of: 25, 26, 29, 32, 33, 34, 51, 54, 89, 90, 93, 94, 95, and 96.

[0861] Embodiment 151 is the ABPC of embodiment 138, wherein the first antigen-binding domain comprises a heavy chain variable domain of SEQ ID NO: 17, SEQ ID NO: 19, SEQ ID NO: 21, SEQ ID NO: 22, SEQ ID NO: 24, SEQ ID NO: 25, SEQ ID NO: 26, SEQ ID NO: 29, SEQ ID NO: 30, SEQ ID NO: 31, SEQ ID NO: 34, SEQ ID NO: 43, SEQ ID NO: 44, SEQ ID NO: 47, SEQ ID NO: 49, SEQ ID NO: 51, or SEQ ID NO: 52.

[0862] Embodiment 152 is the ABPC of embodiment 138 or 151, wherein the first antigen-binding domain comprises a light chain variable domain of SEQ ID NO: 2, SEQ ID NO: 55, SEQ ID NO: 56, SEQ ID NO: 59, SEQ ID NO: 62, SEQ ID NO: 63, SEQ ID NO: 64, SEQ ID NO: 66, SEQ ID NO: 69, SEQ ID NO: 72, SEQ ID NO: 73, SEQ ID NO: 76, SEQ ID NO: 77, SEQ ID NO: 78, and SEQ ID NO: 79.

[0863] Embodiment 153 is the ABPC of embodiment 138, wherein the first antigen-binding domain comprises a heavy chain variable domain of SEQ ID NO: 81, SEQ ID NO: 82, SEQ ID NO: 83, SEQ ID NO: 84, SEQ ID NO: 85, SEQ ID NO: 86, SEQ ID NO: 87, SEQ ID NO: 88, SEQ ID NO: 89, SEQ ID NO: 90, SEQ ID NO: 91.

[0864] Embodiment 154 is the ABPC of embodiment 153, wherein the first antigen-binding domain comprises a light chain variable domain of SEQ ID NO: 2, SEQ ID NO: 55, SEQ ID NO: 56, SEQ ID NO: 59, SEQ ID NO: 62, SEQ ID NO: 63, SEQ ID NO: 64, SEQ ID NO: 66, SEQ ID NO: 69, SEQ ID NO: 72, SEQ ID NO: 73, SEQ ID NO: 76, SEQ ID NO: 77, SEQ ID NO: 78, and SEQ ID NO: 79.

[0865] Embodiment 155 is the ABPC of any one of embodiments 138-154, wherein a composition comprising the ABPC provides for an increase in toxin liberation in the target mammalian cell as compared to a composition comprising the same amount of a control ABPC.

[0866] Embodiment 156 is the ABPC of embodiment 155, wherein a composition comprising the ABPC provides for at least a 20% increase in toxin liberation in the target mammalian cell as compared to a composition comprising the same amount of a control ABPC.

[0867] Embodiment 157 is the ABPC of embodiment 156, wherein a composition comprising the ABPC provides for at least a 50% increase in toxin liberation in the target mammalian cell as compared to a composition comprising the same amount of a control ABPC.

[0868] Embodiment 158 is the ABPC of embodiment 155, wherein a composition comprising the ABPC provides for at least a 2-fold increase in toxin liberation in the target mammalian cell as compared to a composition comprising the same amount of a control ABPC.

[0869] Embodiment 159 is the ABPC of embodiment 158, wherein a composition comprising the ABPC provides for at least a 5-fold increase in toxin liberation in the target mammalian cell as compared to a composition comprising the same amount of a control ABPC.

[0870] Embodiment 160 is the ABPC of any one of embodiments 138-159, wherein a composition comprising the ABPC provides for an increase in target mammalian cell killing as compared to a composition comprising the same amount of a control ABPC.

[0871] Embodiment 161 is the ABPC of embodiment 160, wherein a composition comprising the ABPC provides for at least a 20% increase in target mammalian cell killing as compared to a composition comprising the same amount of a control ABPC.

[0872] Embodiment 162 is the ABPC of embodiment 161, wherein a composition comprising the ABPC provides for at least a 50% increase in target mammalian cell killing as compared to a composition comprising the same amount of a control ABPC.

[0873] Embodiment 163 is the ABPC of embodiment 160, wherein a composition comprising the ABPC provides for at least a 2-fold increase in target mammalian cell killing as compared to a composition comprising the same amount of a control ABPC.

[0874] Embodiment 164 is the ABPC of embodiment 163, wherein a composition comprising the ABPC provides for at least a 5-fold increase in target mammalian cell killing as compared to a composition comprising the same amount of a control ABPC.

[0875] Embodiment 165 is the ABPC of any one of embodiments 138-164, wherein a composition comprising the ABPC provides for an increase in endolysosomal delivery in the target mammalian cell as compared to a composition comprising the same amount of a control ABPC.

[0876] Embodiment 166 is the ABPC of embodiment 165, wherein a composition comprising the ABPC provides for at least a 20% increase in endolysosomal delivery in the target mammalian cell as compared to a composition comprising the same amount of a control ABPC.

[0877] Embodiment 167 is the ABPC of embodiment 166, wherein a composition comprising the ABPC provides for at least a 50% increase in endolysosomal delivery in the target mammalian cell as compared to a composition comprising the same amount of a control ABPC.

[0878] Embodiment 168 is the ABPC of embodiment 165, wherein a composition comprising the ABPC provides for at least a 2-fold increase in endolysosomal delivery in the target mammalian cell as compared to a composition comprising the same amount of a control ABPC.

[0879] Embodiment 169 is the ABPC of embodiment 168, wherein a composition comprising the ABPC provides for at least a 5-fold increase in endolysosomal delivery in the target mammalian cell as compared to a composition comprising the same amount of a control ABPC.

[0880] Embodiment 170 is the ABPC of any one of embodiments 138-169, wherein a composition comprising the ABPC results in a less of a reduction in the level of DLL3 presented on the surface of the target mammalian cell as compared to a composition comprising the same amount of a control ABPC.

[0881] Embodiment 171 is the ABPC of any one of embodiments 138-169, wherein a composition comprising the ABPC does not result in a detectable reduction in the level of the DLL3 presented on the surface of the target mammalian cell.

[0882] Embodiment 172 is the ABPC of any one of embodiments 102-171, wherein the target mammalian cell is a cancer cell.

[0883] Embodiment 173 is the ABPC of any one of embodiments 102-172, wherein the dissociation rate of the antigen-binding domain at a pH of about 4.0 to about 6.5 is at least 10% faster than the dissociation rate of the antigen-binding domain at a pH of about 7.0 to about 8.0.

[0884] Embodiment 174 is the ABPC of any one of embodiments 102-172, wherein the dissociation rate of the antigen-binding domain at a pH of about 4.0 to about 6.5 is at least 3-fold faster than the dissociation rate of the antigen-binding domain at a pH of about 7.0 to about 8.0.

[0885] Embodiment 175 is the ABPC of any one of embodiments 102-172, wherein the dissociation rate of the antigen-binding domain at a pH of about 4.0 to about 6.5 is at least 10-fold faster than the dissociation rate of the antigen-binding domain at a pH of about 7.0 to about 8.0.

[0886] Embodiment 176 is the ABPC of any one of embodiments 102-175, wherein the KD of the antigen-binding domain at a pH of about 4.0 to about 6.5 is at least 10% greater than the KD of the antigen-binding domain at a pH of about 7.0 to about 8.0.

[0887] Embodiment 177 is the ABPC of any one of embodiments 102-175, wherein the KD of the antigen-binding domain at a pH of about 4.0 to about 6.5 is at least 3-fold greater than the KD of the antigen-binding domain at a pH of about 7.0 to about 8.0.

[0888] Embodiment 178 is the ABPC of any one of embodiments 102-175, wherein the KD of the antigen-binding domain at a pH of about 4.0 to about 6.5 is at least 10-fold greater than the KD of the antigen-binding domain at a pH of about 7.0 to about 8.0.

[0889] Embodiment 179 is the ABPC of any one of embodiments 102-178, wherein the ABPC is cytotoxic or cytostatic to the target mammalian cell.

[0890] Embodiment 180 is the ABPC of any one of embodiments 102-179, wherein the ABPC is cross-reactive with a non-human primate DLL3 and human DLL3.

[0891] Embodiment 181 is the pharmaceutical composition of any one of embodiments 102-179, wherein the ABPC is cross-reactive with a non-human primate DLL3, a human DLL3, and one or both of rat DLL3 and a mouse DLL3.

[0892] Embodiment 182 is the pharmaceutical composition of embodiment 181, wherein the ABPC is cross-reactive with a non-human primate DLL3, a human DLL3, a rat DLL3, and a mouse DLL3.

[0893] Embodiment 183 is the ABPC of any one of embodiments 102-182, wherein the antigen-binding domain binds to an epitope of DLL3 that is present on the surface of cells from an Old World Monkey.

[0894] Embodiment 184 is the ABPC of any one of embodiments 102-183, wherein the ABPC comprises a single polypeptide.

[0895] Embodiment 185 is the ABPC of embodiment 184, wherein the antigen-binding domain is selected from the group consisting of: a VH domain, a VHH domain, a VNAR domain, and a scFv.

[0896] Embodiment 186 is the ABPC of embodiment 184 or 185, wherein the ABPC is a BiTe, a (scFv)2, a nanobody, a nanobody-HSA, a DART, a TandAb, a scDiabody, a scDiabody-CH3, scFv-CH-CL-scFv, a HSAbody, scDiabody-HSA, or a tandem-scFv.

[0897] Embodiment 187 is the ABPC of any one of embodiments 102-183, wherein the ABPC comprises two or more polypeptides.

[0898] Embodiment 188 is the ABPC of embodiment 187, wherein the ABPC is selected from the group of an antibody, a VHH-scAb, a VHH-Fab, a Dual scFab, a F(ab′)2, a diabody, a crossMab, a DAF (two-in-one), a DAF (four-in-one), a DutaMab, a DT-IgG, a knobs-in-holes common light chain, a knobs-in-holes assembly, a charge pair, a Fab-arm exchange, a SEEDbody, a LUZ-Y, a Fcab, a κλ-body, an orthogonal Fab, a DVD-IgG, a IgG(H)-scFv, a scFv-(H)IgG, IgG(L)-scFv, scFv-(L)IgG, IgG(L,H)-Fv, IgG(H)-V, V(H)—IgG, IgG(L)-V, V(L)-IgG, KIH IgG-scFab, 2scFv-IgG, IgG-2scFv, scFv4-Ig, Zybody, DVI-IgG, Diabody-CH3, a triple body, a miniantibody, a minibody, a TriBi minibody, scFv-CH3 KIH, Fab-scFv, a F(ab′)2-scFv2, a scFv-KIH, a Fab-scFv-Fc, a tetravalent HCAb, a scDiabody-Fc, a Diabody-Fc, a tandem scFv-Fc, a VHH-Fc, a tandem VHH-Fc, a VHH-Fc KiH, a Fab-VHH-Fc, an Intrabody, a dock and lock, an ImmTAC, an IgG-IgG conjugate, a Cov-X-Body, a scFv1-PEG-scFv2, an Adnectin, a DARPin, a fibronectin, and a DEP conjugate.

[0899] Embodiment 189 is the ABPC of any one of embodiments 120-188, wherein at least one polypeptide of the ABPC is conjugated to the toxin, the radioisotope, the drug, or the small molecule via a cleavable linker.

[0900] Embodiment 190 is the ABPC of any one of embodiments 120-188, wherein at least one polypeptide of the ABPC is conjugated to the toxin, the radioisotope, the drug, or the small molecule via a non-cleavable linker.

[0901] Embodiment 191 is the ABPC of any of embodiments 102-190, wherein the half-life of the ABPC in vivo is decreased as compared to the half-life of a control ABPC in vivo.

[0902] Embodiment 192 is the ABPC of embodiment 191, wherein the half-life of the ABPC in vivo is decreased about 5% to about 95% as compared to the half-life of a control ABPC in vivo.

[0903] Embodiment 193 is the ABPC of embodiment 191, wherein the half-life of the ABPC in vivo is decreased about 10% to about 95% as compared to the half-life of a control ABPC in vivo.

[0904] Embodiment 194 is the ABPC of embodiment 191, wherein the half-life of the ABPC in vivo is decreased about 30% to about 95% as compared to the half-life of a control ABPC in vivo.

[0905] Embodiment 195 is the ABPC of embodiment 191, wherein the half-life of the ABPC in vivo is decreased about 50% to about 95% as compared to the half-life of a control ABPC in vivo.

[0906] Embodiment 196 is the ABPC of embodiment 191, wherein the half-life of the ABPC in vivo is decreased about 70% to about 95% as compared to the half-life of a control ABPC in vivo.

[0907] Embodiment 197 is the ABPC of any one of embodiments 121-196, wherein the control ABPC is capable of specifically binding to DLL3 or an epitope of DLL3 presented on the surface of a target mammalian cell, wherein: (a) the control ABPC comprises a first antigen-binding domain; (b) the dissociation rate of the first antigen-binding domain of the control ABPC at a pH of about 4.0 to about 6.5 is no more than 3-fold faster than the dissociation rate at a pH of about 7.0 to about 8.0; and (c) the dissociation constant (KD) of the first antigen-binding domain of the control ABPC at a pH of about 4.0 to about 6.5 is no more than 3-fold greater than the KD at a H of about 7.0 to about 8.0.

[0908] Embodiment 198 is the ABPC of any one of embodiments 121-196, wherein the control ABPC is capable of specifically binding to DLL3 or an epitope of DLL3 presented on the surface of a target mammalian cell, wherein: (a) the control ABPC comprises a first antigen-binding domain; (b) the dissociation rate of the first antigen-binding domain of the control ABPC at a pH of about 4.0 to about 6.5 is no more than 2-fold faster than the dissociation rate at a pH of about 7.0 to about 8.0; and (c) the dissociation constant (KD) of the first antigen-binding domain of the ABPC at a pH of about 4.0 to about 6.5 is no more than 2-fold greater than the KD at a pH of about 7.0 to about 8.0.

[0909] Embodiment 199 is the ABPC of any one of embodiments 121-196, wherein the control ABPC is capable of specifically binding to DLL3 or an epitope of DLL3 presented on the surface of a target mammalian cell, wherein: (a) the control ABPC comprises a first antigen-binding domain; (b) the dissociation rate of the first antigen-binding domain of the control ABPC at a pH of about 4.0 to about 6.5 is no more than 1-fold faster than the dissociation rate at a pH of about 7.0 to about 8.0; and (c) the dissociation constant (KD) of the first antigen-binding domain of the control ABPC at a pH of about 4.0 to about 6.5 is no more than 1-fold greater than the KD at a pH of about 7.0 to about 8.0.

[0910] Embodiment 200 is the ABPC of any one of embodiments 121-196, wherein the control ABPC is rovalpituzumab.

[0911] Embodiment 201 is the ABPC of any one of embodiments 102-200, wherein the ABPC further comprises a second antigen-binding domain.

[0912] Embodiment 202 is a kit comprising at least one dose of the ABPC of any one of embodiments 102-201.

[0913] Embodiment 203 is a method of treating a cancer characterized by having a population of cancer cells that have DLL3 or an epitope of DLL3 presented on their surface, the method comprising: administering a therapeutically effective amount of the pharmaceutical composition of any one of embodiments 1-100 or the ABPC of any one of embodiments 102-201 to a subject identified as having a cancer characterized by having the population of cancer cells.

[0914] Embodiment 204 is a method of reducing the volume of a tumor in a subject, wherein the tumor is characterized by having a population of cancer cells that have DLL3 or an epitope of DLL3 presented on their surface, the method comprising: administering a therapeutically effective amount of the pharmaceutical composition of any one of embodiments 1-100 or the ABPC of any one of embodiments 102-201 to a subject identified as having a cancer characterized by having the population of cancer cells.

[0915] Embodiment 205 is a method of inducing cell death in a cancer cell in a subject, wherein the cancer cell has DLL3 or an epitope of DLL3 presented on its surface, wherein the method comprises: administering a therapeutically effective amount of the pharmaceutical composition of any one of embodiments 1-98 or the ABPC of any one of embodiments 102-201 to a subject identified as having a cancer characterized by having a population of the cancer cells.

[0916] Embodiment 206 is the method of any one of embodiments 203-205, wherein the cancer is a primary tumor.

[0917] Embodiment 207 is the method of any one of embodiments 203-205, wherein the cancer is a metastasis.

[0918] Embodiment 208 is the method of any one of embodiments 203-207, wherein the cancer is a non-T-cell-infiltrating tumor.

[0919] Embodiment 209 is the method of any one of embodiments 203-207, wherein the cancer is a T-cell infiltrating tumor.

[0920] Embodiment 210 is a method of decreasing the risk of developing a metastasis or decreasing the risk of developing an additional metastasis in a subject having a cancer, wherein the cancer is characterized by having a population of cancer cells that have DLL3 or an epitope of DLL3 presented on their surface the method comprising: administering a therapeutically effective amount of the pharmaceutical composition of any one of embodiments 1-100 or the ABPC of any one of embodiments 102-201 to a subject identified as having a cancer characterized by having the population of cancer cells.

[0921] Embodiment 211 is the method of embodiment 210, wherein the cancer is a non-T-cell-infiltrating tumor.

[0922] Embodiment 212 is the method of embodiment 210, wherein the cancer is a T-cell infiltrating tumor.

[0923] The invention is further described in the following examples, which do not limit the scope of the invention described in the claims.

### EXAMPLES

### Example 1. Generation of DLL3 Binders and Engineering of pH Binding Dependence

[0924] pH-engineered ABPCs specific for DLL3 are generated using two methods. In the first approach, published monoclonal antibodies against DLL3 are used as a starting template for introduction of additional mutations that allow engineering of pH-dependent binding to DLL3 and i) enhanced endolysosomal accumulation of a conjugated toxin, as well as ii) enhanced DLL3 recycling to the cell surface. The second approach involves discovery of de novo ABPCs specific for DLL3 via antibody display methods from naive libraries or libraries with defined CDR compositions and screening under conditions designed for selection of pH-engineered ABPCs specific for DLL3. In either case, histidine residues play an important role in engineering pH-dependent binding proteins.

[0925] Histidine residues are at least partially protonated at a pH below 6.5 owing to its pKa of 6.0. Therefore, if a histidine side chain in an antigen-binding domain participates in an electrostatic binding interaction with its antigen it will start to turn positively charged at a pH at or below 6.5. This could either weaken or enhance the binding affinity of the interaction at a pH below 6.5, based on the corresponding charge of and interactions with the antigen epitope. Thus, systematic introduction of histidines into antibody complementarity determining regions (CDRs) in an antibody or other binder library (e.g., an scFv library) can be used to identify substitutions that will affect an antigen-binding domain's interaction with an antigen at lower pH values. The first approach therefore involves histidine-scanning of variable region sequences of published monoclonal antibodies to identify pH-dependent variants.

[0926] Multiple DLL3-binding monoclonal antibodies have been described in the literature and can be used as a template for engineering pH-dependent binding [Saunders L R et al (2015) “A DLL3-targeted antibody-drug conjugate eradicates high-grade pulmonary neuroendocrine tumor-initiating cells in vivo.” Science Translational Medicine 7(302):302ra136, Puca L et al (2019) “Delta-like protein 3 expression and therapeutic targeting in neuroendocrine prostate cancer” Science Translational Medicine 484:eaav0891]. Briefly, for a subset of the antibody sequences, CDRs in each chain are identified using the methods described by Kabat et al (Kabat et al. (1992) Sequences of Proteins of Immunological Interest (DIANE publishing) and IMGT (Lefranc M P (1999) “The IMGT unique numbering for Immunoglobulins, T cell receptors and Ig-like domains” The Immunologist 7, 132-136), and for each CDR, residues falling under either or both Kabat and IMGT CDR definitions were called as CDR residues. To engineer pH-dependent sequence variants, individual amino acid residues within the heavy chain and/or light chain CDRs are systematically substituted with a histidine, one at a time. In cases where the starting CDR residue is a histidine, it is mutated to an alanine. Antibody variants with only one histidine or alanine mutation in a heavy/light chain CDR are generated by co-transfection of Expi293 cells with a) one heavy chain or light chain sequence variant, and b) the corresponding starting ABPC (e.g., the starting DLL3-binding monoclonal antibody) light chain or heavy chain, respectively, using methods known to the art. After allowing for a period of protein expression, cell culture supernatants are collected, quantified, and the pH dependence of the variant is evaluated using biolayer interferometry (BLI) or other methods known to the art. Briefly, cell culture supernatants are normalized to an antibody expression level of 50 μg/mL, and captured on an anti-human Fc sensor (Forte Bio). A baseline is established using 1× kinetics buffer (Forte Bio), and the sensor is associated with 100 nM of DLL3 in 1×PBS at pH 7.4 for 300 sec to generate an association curve. In the dissociation phase, the antibody-antigen complex on the sensor is exposed to 1×PBS at either pH 5.5 or pH 7.4 for 300-500 sec. Association and dissociation phase curves are examined for the starting ABPC antibody and each corresponding antibody variant at pH 5.5 and pH 7.4 to inform on two criteria: a) enhanced dissociation (i.e., higher k_{off} values) at pH 5.5 due to histidine or alanine substitution compared to the starting ABPC, and b) reduced dissociation at pH 7.4 (i.e., lower k_{off} values) compared to pH 5.5 in the antibody variant itself and with the starting ABPC. Variants that show either enhanced dissociation at pH 5.5 or reduced dissociation at pH 7.4 or both are selected for further analysis. It is also noted that while some histidine and alanine mutations obliterate DLL3 binding, others are tolerated with little (e.g., less than 1-fold change in KD or dissociation rate) or no change in DLL3 binding kinetics. Especially because histidine is a large, positively charged amino acid, these histidine variants and alanine variants with no change are noted as positions that may tolerate a wide range of mutations and lead to antibodies with different sequence but similar binding properties, a designation that is not otherwise apparent. The variants selected for further analysis are expressed at a larger scale and purified using protein A affinity chromatography. Binding kinetics (kₒₙ and k_{off}) of the purified starting ABPC and variant antibodies are measured at pH 5.5 and pH 7.4 using Biacore (GE Healthcare). The ratio of the antibody's rate of dissociation (k_{off} at pH 7.4 divided by k_{off} at pH 5.5) is also used as a quantitative assessment of pH-dependent binding; similarly, the dissociation constant K_{D} is calculated at both pH 5.5 and pH 7.4 as k_{off} divided by kₒₙ and the ratio of the antibody's dissociation constant (K_{D} at pH 7.4 divided by K_{D} at pH 5.5) is also used as a quantitative assessment of pH-dependent binding. Antibodies with a rate of dissociation ratio less than that of the starting ABPC and/or a dissociation constant ratio less than that of the starting ABPC are selected for further assessment of combinatorial substitutions. Favorable histidine and/or alanine amino acid positions can also be combined to enhance pH dependence; this can be done by, e.g., combinatorially or rationally combining histidine and/or alanine substitutions on a given heavy or light chain that individually improve pH dependence, by, e.g., combinatorially or rationally combining modified heavy and light chains such that histidine and/or alanine substitutions are present on both chains, or combinations thereof. Such combinatorial variants are generated and tested/analyzed for differential pH dependence using the methods and protocols described herein, or others known to the art. Antibody variants that have the lowest rate of dissociation ratios and/or dissociation constant ratios are selected as candidates for further analysis (hereafter referred to as “pH-engineered ABPCs specific for DLL3”).

[0927] The second method for selection of pH-engineered ABPCs specific for DLL3 involves either screening libraries to identify de novo pH-dependent ABPCs specific for DLL3 or ABPCs that could serve as templates for engineering pH-dependent binding as described herein. Two types of libraries can be used for these selections: naive phage/yeast display antibody libraries (e.g., Fab, scFv, VHH, VL, or others known to the art) or phage/yeast display libraries where CDRs have been mutated to express a subset of amino acid residues. Libraries are screened against soluble recombinant DLL3 extracellular domains using methods known to the art with positive selection for variants that bind weakly (e.g., are eluted from beads) at pH 5.0 and bind strongly (e.g., are bound to beads) at pH 7.4. Three rounds of selections are performed. The final round of binders are screened using ELISA for binding to human DLL3 and cyno DLL3 and mouse DLL3 or via mean fluorescence intensity in flow cytometric analysis. If more binders with cyno or murine cross-reactivity are desired, the final selection round can instead be performed on cyno DLL3 or murine DLL3. Selected binding proteins are subcloned into mammalian expression vectors and expressed as either full IgG proteins or Fc fusions in Expi293 cells. BLI analysis is performed as described herein for selection of pH-dependent binder variants and confirmed using Biacore.

### Example 2. In Vitro Demonstration of pH-Dependent Binding to DLL3, pH-Dependent Release of DLL3, Enhanced Endolysosomal Delivery in DLL3+ Cells, and Increased DLL3 Antigen Density in DLL3+ Cells after Exposure to pH-Engineered ABPCs Specific for DLL3 as Compared to Control ABPCs Specific for DLL3

[0928] As discussed herein, pH-engineered ABPCs specific for DLL3 exhibit the desirable property of decreased DLL3 binding at acidic pH (e.g., pH 5.0, pH 5.5), but enhanced binding at higher pH (e.g., pH 7.4), which enhances their accumulation in endolysosomes under physiological conditions.

[0929] ph-Dependent Binding to DLL3 on Cells

[0930] To demonstrate that pH-engineered ABPCs specific for DLL3 binds cell surface DLL3 at neutral pH, a cell surface binding assay is performed. A panel of human cells that are DLL3+ is assembled (e.g., NCI-H82NCI-H660,U-118-MG). Methods of identifying and quantifying gene expression (e.g., DLL3) for a given cell line are known to the art, and include, e.g., consulting the Cancer Cell Line Encyclopedia (CCLE; https://portals.broadinstitute.org/ccle) to ascertain the expression level and/or mutation status of a given gene in a tumor cell line), rtPCR, microarray, or RNA-Seq analysis, or cell staining with antibodies known in the art (e.g. R&D Systems Human DLL3 Antibody (AB4315) or Abcam Recombinant Anti-DLL3 Antibody, Cat #AB229902 for DLL3). Cells are seeded at approximately 5-10,000 per well in 150 μL of pH 7.4 culture medium and incubated at 37° C. for 5 minutes at several doses (e.g., a two-fold dilution series) from 1 μM to 1 μM with one of the following antibodies: a known, control ABPC specific for DLL3 (e.g., an antibody, rovalpituzumab, SC16.4, SC16.13, SC16.15, SC16.25, SC16.34, SC16.67), the pH-engineered ABPC specific for DLL3, and an appropriate negative isotype control mAb (e.g., Biolegend Purified Human IgG1 Isotype Control Recombinant Antibody, Cat #403501). Prior to the onset of the experiment, the binding properties of all antibodies are validated using methods known to the art. Following the 5 minute incubation, cells are fixed with 4% formaldehyde (20 min at room temperature) and incubated with an appropriate fluorophore-labeled secondary antibody (e.g., ThermoFisher Mouse anti-Human IgG1 Fc Secondary Antibody, Alexa Fluor 488, Cat #A-10631) for 60 minutes. Unbound reagents are washed with a series of PBS washes, and the cell panels are imaged using confocal microscopy. Upon analysis of the images, significant fluorescence can be observed on the surface of cells bound with the known, control ABPC specific for DLL3 as well as the pH-engineered ABPC specific for DLL3, but little surface binding can be observed for the isotype negative control. To isolate the effect of pH on surface binding, the same experiment is repeated twice, with the primary antibody incubation taking place at sequentially lower pH (e.g., pH 6.5 and 5.5 and 5.0). Analysis of the resulting confocal microscopy images can show significant fluorescence on the surface of cells bound with all mAbs tested, excepting the isotype negative control, and that this fluorescence decreases for the pH-engineered ABPC specific for DLL3 as the pH decreases. Alternatively, cells are analyzed for mean fluorescent intensity by flow cytometry using methods known in the art. A dissociation constant KD on cells at neutral pH of the antibodies analyzed is determined by nonlinear regression methods known in the art (e.g., a Scatchard plot). Taken together, the results can show that the pH engineering process results in the creation of a pH-engineered ABPC specific for DLL3 that is pH-dependent in its binding properties and that it more effectively binds at neutral pH as compared to more acidic pH. Other methods of assessing the pH dependence of the pH-engineered ABPCs specific for DLL3 are known in the art and include, e.g., using flow cytometry to measure ABPC surface binding.

[0931] pH-Dependent Release of DLL3 on Cells

[0932] To demonstrate that pH-engineered ABPCs specific for DLL3 are capable of releasing DLL3 at low pH after binding at a neutral pH, a variant of the cell surface binding assay described above is performed using methods known to the art (e.g., as generally described in Gera N. (2012) PLoS ONE 7(11): e48928). Briefly, an appropriate DLL3+ cell line (passage number less than 25) is harvested and 50,000 cells per well are plated in a U-Bottomed 96-well microplate. Three conditions are tested; binding and secondary staining at pH 7.4, binding and secondary staining at pH 5.0, and binding at pH 7.4 followed by release at pH 5.0 for 30 minutes and secondary staining at pH 7.4. Both pH-engineered ABPCs specific for DLL3 as well as a control ABPC specific for DLL3 are tested. The cells are washed two times with 200 μL of FACS buffer (1×PBS containing 3% Fetal Bovine Serum) at either pH 7.4 or 5.0 depending on the condition being tested. The purified protein samples are diluted into FACS buffer of the appropriate pH and added to the cells and allowed to bind for one hour on ice. After incubation with the primary antibodies the pH 7.4 and pH 5.0 conditions are washed twice as before, and then 100 μl of secondary rat anti-human Fc AF488 (BioLegend 410706) or other appropriate antibody, diluted 1:50, or anti Myc-Tag mouse mAb-AF488 (Cell Signaling Technologies 2279S) diluted 1:50 is added in FACS buffer of the appropriate pH, and incubated for 30 minutes on ice. The pH 5.0 release condition is washed twice with FACS buffer pH 7.4 and then resuspended in 100 μl of FACS buffer pH 5.0 and incubated on ice for 30 minutes, followed by secondary staining in FACS buffer pH 7.4 as described for the other conditions. The plates are washed twice as before and resuspended in 1% paraformaldehyde in the appropriate FACS buffer to fix them for flow cytometry analysis. All conditions are read on a flow cytometer (Accuri C6, BD Biosciences). Binding is observed as a shift in the FL1 signal (as a mean fluorescence intensity) versus secondary alone. Upon analysis of the data, it can be determined that both the pH-engineered ABPC specific for DLL3 as well as the control ABPC specific for DLL3 effectively bind the surface of DLL3+ cells at neutral pH, but the pH-engineered ABPC specific for DLL3 binds poorly at pH 5.0; similarly, it can be determined that the pH-engineered ABPC specific for DLL3 binds effectively at pH 7.4, but then releases/unbinds DLL3 at pH 5.0.

[0933] Enhanced Endolysosomal Delivery in DLL3+ Cells of pH-Engineered ABPCs Specific for DLL3 as Compared to Control ABPCs Specific for DLL3 (pHrodo)

[0934] To verify and demonstrate that ABPCs specific for DLL3 achieve endolysosomal localization following cellular uptake, an internalization assay is performed using methods known to the art (e.g., Mahmutefendic et al., Int. J. Biochem. Cell Bio., 2011). Briefly, as described herein, a panel of human cells that express DLL3 highly is assembled using methods known to the art. Cells are plated, washed three times with PBS, and incubated at 37 degrees C. for 60 minutes in media at neutral pH, with added concentrations of 2 micrograms per milliliter of a known, control ABPC specific for DLL3 (e.g., as described herein), the pH-engineered ABPC specific for DLL3, and an appropriate negative isotype control mAb (e.g., as described herein). In a subset of cells, validation of antibody internalization and endosomal localization is performed using methods known to the art; e.g., cells are fixed in 4% formaldehyde as described herein, permeabilized using TWEEN 20 or other methods known to the art (Jamur M C et al (2010) Permeabilization of cell membranes, Methods Mol Biol. 588:63-6), additionally stained with an endosomal marker, e.g., a fluorescent RAB11 antibody (RAB11 Antibody, Alexa Fluor 488, 3H18L5, ABfinity™ Rabbit Monoclonal), stained with an appropriate fluorescently labeled anti-human secondary antibody (e.g., as described herein), and imaged using confocal fluorescence microscopy, as described herein. Analysis of the confocal images can be used to show that both the pH-engineered ABPC specific for DLL3 as well as the control ABPC specific for DLL3 are internalized and accumulate in the endolysosomes.

[0935] To demonstrate that pH-engineered ABPCs specific for DLL3 achieve enhanced endolysosomal accumulation relative to a control ABPC specific for DLL3, a pHrodo-based internalization assay is performed using both a known, control ABPC specific for DLL3 (e.g., as described herein) as well as the pH-engineered ABPC specific for DLL3. The assay makes use of pHrodo™ iFL (P36014, ThermoFisher), a dye whose fluorescence increases with decreasing pH, such that its level of fluorescence outside the cell at neutral pH is lower than its level of fluorescence inside the acidic pH environment of endolysosomes. Briefly, an appropriate DLL3+ cell line (less than passage 25) is suspended in its recommended media (e.g., by cell banks or cell bank databases ATCC, DSMZ, or ExPASy Cellosaurus) and plated in a 24-well plate at a density of 2,000,000 cells/mL, 1 mL per well. While keeping the cells on ice, 1 mL of 2×pHrodo iFL-labeled antibody (prepared in accordance with the manufacturer's instructions) is added to each well, the well is pipetted/mixed five times, and the plate is incubated in a light-protected environment for 45 minutes, on ice. An identical but separate plate is also incubated on ice that is meant as a no-internalization negative control. Following this incubation, the experimental plate is moved to a 37 degree C. incubator, the negative control plate is kept on ice to slow or block internalization, and samples are taken at designated time points to create an internalization time course. Samples are placed into a U-bottom 96-well plate, and internalization is quenched via addition of 200 μL/well of ice-cold FACS buffer. The plates are spun down at 2000×g for 2 minutes, resuspended in 200 μL ice-cold FACS buffer, spun down again, and resuspended in FACS buffer a second time. Finally, the samples are loaded into a flow cytometer for read-out of cellular pHrodo fluorescence using excitation and emission wavelengths consistent with the excitation and emission maxima of the pHrodo iFL Red dye (566 nm and 590 nm, respectively). Upon completion of the flow cytometry experiment and analysis of the data, it can be observed that cells treated with the pH-engineered ABPC specific for DLL3 have a higher pHrodo iFL signal relative to a known, control ABPC specific for DLL3, indicating that pH-engineered ABPCs specific for DLL3 achieve enhanced endolysosomal accumulation relative to a control ABPC specific for DLL3.

[0936] Alternatively, to demonstrate that pH-engineered ABPCs specific for DLL3 achieve enhanced endolysosomal accumulation relative to a control ABPC specific for DLL3, a variation of the above-described experiment is performed. DLL3+ cells are plated, washed three times with PBS, and incubated at 37 degrees C. for 60 minutes in media at neutral pH with added concentrations of 2 μg/mL of either pH-engineered ABPC specific for DLL3 or control ABPC specific for DLL3. Following incubation, cells are washed three times with PBS, fixed and permeabilized, and stained with a panel of appropriately selected antibodies that bind late endosomal markers as well as lysosomes (e.g., RAB7, and LAMP1; Cell Signaling Technology, Endosomal Marker Antibody Sampler Kit #12666; AbCam, Anti-LAMP2 antibody [GL2A7], ab13524). After primary antibody staining, cells are stained with an appropriate mixture of fluorescently labeled secondary antibodies (e.g., Goat Anti-Human IgG (H&L) Secondary Antibody (Alexa Fluor 647)Cat #A-21445, and Abcam Goat Anti-Rabbit IgG H&L (Alexa Fluor 488), Cat #ab150077), imaged using confocal fluorescence microscopy, and regions of co-localization of signal from DLL3-specific antibodies and endosomal markers are visualized and quantified. Upon analysis of the data, it can be revealed that there is increased co-localization of endolysosomal and DLL3-specific antibody signal in wells treated with the pH-engineered ABPCs specific for DLL3 as compared to wells treated with control ABPC specific for DLL3, and can thereby demonstrate that pH-engineered ABPCs specific for DLL3 achieve enhanced endolysosomal accumulation relative to control ABPC specific for DLL3.

[0937] Increased DLL3 Antigen Density in DLL3+ Cells after Exposure to pH-Engineered ABPCs Specific for DLL3 as Compared to Control ABPCs Specific for DLL3

[0938] To demonstrate that treatment of cells with the pH-engineered ABPCs specific for DLL3 does not result in a detectable reduction of the level of DLL3 on the surface of cells exposed to the pH-engineered ABPCs specific for DLL3, or that said treatment results in less of a reduction of the level of DLL3 on the surface of cells exposed to the pH-engineered ABPC specific for DLL3 versus a control ABPC specific for DLL3, an antigen density study is performed using flow cytometry. Briefly, 4.0×10≡cells that express DLL3 are plated per well in a 96-well plate in 100 μL media. Cells are treated with a titration from 1 μM to 1 μM of i) pH-engineered ABPCs specific for DLL3, ii) a first control ABPC specific for DLL3, iii) an appropriate isotype control, and iv) an untreated control. Cells are incubated for 2 hours at 37° C., at which point all cells are incubated with 200 nM of a fluorophore-labeled second control ABPC specific for DLL3 (e.g., as described herein) which has a different epitope (as determined by, e.g., competitive binding studies on cells) than either the first control ABPC specific for DLL3 or the pH-engineered ABPCs specific for DLL3 for 30 minutes at 4° C. Following this 30-minute incubation, the mean fluorescence intensity (MFI) of all cells is read out using, e.g., flow cytometry, using methods known to one of ordinary skill in the art. In parallel, a quantitative standard curve that can be used to quantify the presence of DLL3 on the surface of treated cells as a function of MFI is generated using a commercially available quantification kit (e.g., BD Biosciences PE Phycoerythrin Fluorescence Quantitation Kit, catalog #340495); the quantitative standard curve is created by following the manufacturer's instructions. Other methods of determining the absolute number of DLL3 on the cell surface are known in the art and include, e.g., use of radioisotopically labeled reagents. Upon analysis of the data, it can be revealed that at least one antibody concentration, cells treated with a control ABPC specific for DLL3 experience a reduction of the level of DLL3 on their surface, whereas cells treated with pH-engineered ABPCs specific for DLL3 experience a significantly smaller reduction or no reduction at all, both relative to the isotype and untreated controls.

### Example 3. Conjugation of pH-Engineered and Control ABPCs Specific for DLL3 to Cytotoxic Drugs

[0939] An antigen-binding protein construct conjugate (ADC) is made comprising the DLL3-binding IgG (hereafter, DLL3-IgG) described herein linked to monomethyl auristatin E (MMAE) via a valine-citrulline (ve) linker (hereafter, DLL3-IgG-DC). Conjugation of the antigen-binding protein construct with vcMMAE begins with a partial reduction of the DLL3-IgG followed by reaction with maleimidocaproyl-Val-Cit-PABC-MMAE (vcMMAE). The DLL3-IgG (20 mg/mL) is partially reduced by addition of TCEP (molar equivalents of TCEP:mAb is 2:1) followed by incubation at 0° C. overnight. The reduction reaction is then warmed to 20° C. To conjugate all of the thiols, vcMMAE is added to a final vcMMAE:reduced Cys molar ratio of 1:15. The conjugation reaction is carried out in the presence of 10% v/v of DMSO and allowed to proceed at 20° C. for 60 minutes.

[0940] After the conjugation reaction, excess free N(acetyl)-Cysteine (2 equivalents vs. vcMMAE charge) is added to quench unreacted vcMMAE to produce the Cys-Val-Cit-MMAE adduct. The Cys quenching reaction is allowed to proceed at 20° C. for approximately 30 minutes. The Cys-quenched reaction mixture is purified as per below. The above conjugation method can also be used to conjugate maleimidocaproyl monomethylauristatin F (mcMMAF) to an antigen-binding protein construct.

[0941] The DLL3-IgG-DC is purified using a batch purification method. The reaction mixture is treated with the appropriate amount of water washed Bu-HIC resin (ToyoPearl; Tosoh Biosciences), i.e., seven weights of resin is added to the mixture. The resin/reaction mixture is stirred for the appropriate time, and monitored by analytical hydrophobic interaction chromatography for removal of drug conjugate products, filtered through a coarse polypropylene filter, and washed by two bed volumes of a buffer (0.28 M sodium chloride, 7 mM potassium phosphate, pH 7). The combined filtrate and rinses are combined and analyzed for product profile by HIC HPLC. The combined filtrate and rinses are buffer exchanged by ultrafiltration/diafiltration (UF/DF) to 15 mM histidine, pH 6 with 10 diavolumes 15 nM histidine buffer.

[0942] A similar protocol can be used to conjugate DNA toxins such as SG3249 and SGD-1910 to DLL3-IgG (see Tiberghien A C et al (2016) Design and Synthesis of Tesirine, a Clinical Antibody-Drug Conjugate Pyrrolobenzodiazepine Dimer Payload, ACS Med Chem Lett 7:983-987). Briefly, for SG3249, DLL3-IgG (15 mg, 100 nanomoles) is diluted into 13.5 mL of a reduction buffer containing 10 mM sodium borate pH 8.4, 2.5 mM EDTA and a final antibody concentration of 1.11 mg/mL. A 10 mM solution of TCEP is added (1.5 molar equivalent/antibody, 150 nanomoles, 15 microliters) and the reduction mixture is heated at +37° C. for 1.5 hours in an incubator. After cooling down to room temperature, SG3249 is added as a DMSO solution (5 molar equivalent/antibody, 500 nanomoles, in 1.5 mL DMSO). The solution is mixed for 1.25 hours at room temperature, then the conjugation is quenched by addition of N-acetyl cysteine (1 micromole, 100 microliters at 10 mM), and injected into an AKTA™ Pure FPLC using a GE Healthcare HiLoad™ 26/600 column packed with Superdex 200 PG, and eluted with 2.6 mL/min of sterile-filtered phosphate-buffered saline (PBS). Fractions corresponding to the DLL3-IgG-DC monomer peak are pooled, concentrated using a 15 mL Amicon Ultracell 50 KDa MWCO spin filter, analysed and sterile-filtered. UHPLC analysis on a Shimadzu Prominence system using a Phenomenex Aeris 3.6u XB-C18 150×2.1 mm column eluting with a gradient of water and acetonitrile on a reduced sample of DLL3-IgG-DC at 280 nm and 330 nm (SG3249 specific) can show a mixture of light and heavy chains attached to several molecules of SG3249, consistent with a drug-per-antibody ratio (DAR) of 1 to 4 molecules of SG3249 per antibody. UHPLC analysis on a Shimadzu Prominence system using a Phenomenex Yarra 3u SEC-3000 300 mm×4.60 mm column eluting with sterile-filtered SEC buffer containing 200 mM potassium phosphate pH 6.95, 250 mM potassium chloride and 10% isopropanol (v/v) on a sample of DLL3-IgG-DC at 280 nm can show a monomer purity of over 90% with no impurity detected. UHPLC SEC analysis allows determination of final DLL3-IgG-DC yield of greater than 30%.

[0943] Alternatively, methods to conjugate toxins to antibodies via lysine residues are known in the art (e.g., see Catcott K C et al (2016) Microscale screening of antibody libraries as maytansinoid antibody-drug conjugates, MAbs 8:513-23). In addition, similar methods to the above can be used to conjugate drugs and toxins to non-IgG formats with disulfide bonds, such as Vh-Fcs.

### Example 4. Demonstration of Enhanced Cytotoxicity of pH-Engineered ABPC ADCs Specific for DLL3 in DLL3+ Cells as Compared to a Control ABPC ADC Specific for DLL3

[0944] The cytotoxic activity of both pH-engineered ADCs specific for DLL3 (e.g., a pH-engineered DLL3-IgG-DC) and control ABPC ADCs specific for DLL3 (e.g., a control ABPC DLL3-IgG-DC) are separately evaluated on a panel of DLL3+ cell lines expressing a variety of antigen densities (e.g., as described herein) and a DLL3− cell line (e.g., A549), selected using the methods described herein, and, optionally, cells expressing transgenic DLL3, e.g., HEK293 cells transfected with DLL3 using methods known in the art (e.g., Expi293™ Expression System Kit ThermoFisher Catalog number: A14635). For purposes of validation, prior to use, all cell lines are tested for expression of DLL3 using methods known to the art, e.g., qPCR, flow cytometry, mRNA RPKM, and antibody staining using anti-DLL3 antibodies known to the art (e.g., as described herein) followed by visualization of the stain using fluorescence microscopy, immunohistochemistry, flow cytometry, ELISA, or other methods known to the art. To evaluate the cytotoxicity of compounds, cells are seeded at approximately 10-40,000 per well in 150 microliters of culture medium, then treated with graded doses of compounds from 1 pM to 1 μM in quadruplicates at the initiation of the assay. Cytotoxicity assays are carried out for 96 hours after addition of test compounds. Fifty microliters of resazurin dye are added to each well during the last 4 to 6 hours of the incubation to assess viable cells at the end of culture. Dye reduction is determined by fluorescence spectrometry using the excitation and emission wavelengths of 535 nm and 590 nm, respectively. For analysis, the extent of resazurin reduction by the treated cells is compared to that of untreated control cells, and percent cytotoxicity is determined. Alternatively, a WST-8 kit is used to measure cytotoxicity per the manufacturer's instructions (e.g., Dojindo Molecular Technologies Catalog #CCK-8). IC50, the concentration at which half-maximal killing is observed, is calculated using curve-fitting methods known in the art. Upon analysis of the data, it can be determined that pH-engineered and control ABPC ADCs specific for DLL3 are substantially cytotoxic to one or more DLL3+ cell line, but less toxic to DLL3-cells. It also can be determined that pH-engineered ADCs specific for DLL3 are more cytotoxic to one or more DLL3+ cell lines than control ABPC ADCs specific for DLL3 because: a) they show greater depth of killing at one or more concentrations or, b) they show lower IC50 or, c) they show a greater ratio of their dissociation constant KD on cells at neutral pH (as described herein) divided by their IC50 on those same cells.

[0945] Additionally, the cytotoxic activity of ABPCs specific for DLL3 can be measured in a secondary ADC assay. Secondary ADC assays are known in the art (e.g., Moradec Cat #αHFc-NC-MMAF and Cat #αHFc-CL-MMAE, and associated manufacturer's instructions). Briefly, the assay is carried out as in the previous paragraph, except the ABPC specific for DLL3 is substituted for the ADC specific for DLL3, and to evaluate the cytotoxicity of compounds, cells are seeded at approximately 10-40,000 per well in 150 microliters of culture medium, then treated with graded doses of ABPC specific for DLL3 from 1 pM to 1 μM (final concentration in culture medium, having been pre-mixed with 100 nM, final concentration in culture medium, of Moradec Cat #αHFc-NC-MMAF secondary ADC reagent and pre-incubated at 37° C. for 30 min before addition of the mixture to the culture medium) in quadruplicates at the initiation of the assay.

[0946] The cytotoxic activity of pH-engineered ADCs specific for DLL3 and control ABPC ADCs specific for DLL3 conjugates, as well as ABPCs specific for DLL3 in a secondary ADC assay, are additionally measured by a cell proliferation assay employing the following protocol (Promega Corp. Technical Bulletin TB288; Mendoza et al., Cancer Res. 62:5485-5488, 2002):

[0947] 1. An aliquot of 100 microliters of cell culture containing about 104 cells (e.g., DLL3+ cells as described herein) in medium is deposited in each well of a 96-well, opaque-walled plate.

[0948] 2. Control wells are prepared containing medium and without cells.

[0949] 3. ADC specific for DLL3 is added to the experimental wells at a range of concentrations from 1 pM-1 uM and incubated for 1-5 days. Alternatively, in a secondary ADC assay, 100 nM secondary ADC reagent (final concentration in culture medium, Moradec Cat #αHFc-NC-MMAF) and ABPC specific for DLL3 at a range of concentrations from 1 pM-1 uM (final concentration in culture medium) are pre-mixed and pre-incubated at 37° C. for 30 min before addition of the mixture to the culture medium, and incubated for 1-5 days.

[0950] 4. The plates are equilibrated to room temperature for approximately 30 minutes.

[0951] 5. A volume of CellTiter-Glo Reagent equal to the volume of cell culture medium present in each well is added.

[0952] 6. The contents are mixed for 2 minutes on an orbital shaker to induce cell lysis.

[0953] 7. The plate is incubated at room temperature for 10 minutes to stabilize the luminescence signal.

[0954] 8. Luminescence is recorded and reported in graphs as RLU=relative luminescence units.

### Example 5. Demonstration of Enhanced Toxin Liberation of pH-Engineered ABPC ADCs Specific for DLL3 in DLL3+ Cells as Compared to a Control ABPC ADC Specific for DLL3

[0955] The pH-engineered ADCs specific for DLL3 (e.g., a pH-engineered DLL3-IgG-DC) can also demonstrate increased toxin liberation in DLL3+ cells as compared to a control ABPC ADC specific for DLL3 (e.g., a control ABPC DLL3-IgG-DC). After treatment of DLL3+ cells with pH-engineered and control ABPC ADCs specific for DLL3 as described herein, an LC-MS/MS method is used to quantify unconjugated (i.e., liberated) MMAE in treated DLL3+ cells (Singh, A. P. and Shah, D. K. Drug Metabolism and Disposition 45.11 (2017): 1120-1132.) An LC-MS/MS system with electrospray interphase and triple quadrupole mass spectrometer is used. For the detection of MMAE, a XBridge BEH Amide column (Waters, Milford, Mass.) is used with mobile phase A as water (with 5 mM ammonium formate and 0.1% formic acid) and mobile phase B as 95:5 acetonitrile/water (with 0.1% formic acid and 1 mM ammonium formate), using a gradient at a flow rate of 0.25 mL/min at 40° C. The total duration of the chromatographic run is 12 minutes, where two MRM scans (718.5/686.5 and 718.5/152.1 amu) are monitored. Deuterated (d8) MMAE (MCE MedChem Express, Monmouth Junction, N.J.) is used as an internal standard. First, an equation for quantifying unconjugated MMAE in a biological sample is derived by dividing the peak area for each drug standard by the peak area obtained for the internal standard. The resultant peak area ratios are then plotted as a function of the standard concentrations, and data points are fitted to the curve using linear regression. Three QC samples are included in the low, middle, and upper ranges of the standard curve to assess the predictive capability of the developed standard curve. The standard curves obtained are then used to deduce the observed concentrations of MMAE in a biologic sample. For measurement of MMAE concentration, treated cell samples are pelleted and reconstituted in fresh media to a final concentration of 0.25 million cells/100 μL. Samples are spiked with d8-MMAE (1 ng/mL) before performing cell lysis by the addition of a 2-fold volume of ice-cold methanol followed by freeze-thaw cycle of 45 minutes at −20° C. The final cell lysate is obtained by centrifuging the samples at 13,000 rpm for 15 minutes at 4° C. followed by collection of supernatant. For the preparation of standards and QC samples, a fresh cell suspension (0.25 million/100 μl) is spiked with known concentrations of MMAE and internal standard (d8-MMAE) before a procedure similar to the cell lysis mentioned above. The resulting cell lysates are then evaporated and reconstituted in mobile phase B before injection into LC-MS/MS. The concentration of unconjugated MMAE in lysates of DLL3+ cells treated with pH-engineered ADCs specific for DLL3 is observed to be greater than that in DLL3+ cells treated with control ABPC ADC specific for DLL3.

[0956] For tubulin-inhibiting toxins, toxin liberation is also assessed by monitoring of cell viability and cell cycle phase. ˜2.0×10\hat{ }5 DLL3+ cells are plated in a 96-well flat bottom plate and treated with pH-engineered and control ABPC ADCs specific for DLL3 as described herein. After treatment, cells are transferred to a 96-round bottom plate, and the plate is centrifuged at 400 rcf for 2 min to decant supernatant. Decanted cells are stained with Live/Dead eFluor 660. Cells are then centrifuged and washed with FACS buffer (PBS with 2% FBS), after which cell cycle distribution is analyzed with a BD Cycletest™ Plus DNA Kit (cat #340242). Briefly, cells are re-suspended in 76 ul Solution A and incubated for 10 min at room temperature. 61 μL Solution B is then added, and cells are incubated for another 10 min at room temperature. Finally, 61 μL of cold Solution C is added, and cells are again incubated for 10 min at room temp. Immediately after the last incubation step, cells are analyzed by flow cytometry (without washing) at a flow rate of 10 μL/sec. Increased G2/M-phase arrest can be observed with exposure to pH-engineered ADCs specific for DLL3 as compared to control ABPC ADC specific for DLL3.

[0957] For DNA-damaging toxins (e.g., pyrrolobenzodiazepine or “PBD”), DNA damage is assessed by measuring the phosphorylated histone H2AX (γH2AX). H2AX is normally phosphorylated in response to double-strand breaks in DNA; however, increased levels γH2AX may also be observed as a result of treatment with DNA-cross-linking toxins such as PBD or cisplatin (Huang, X. et al. 2004, Cytometry Part A 58A, 99-110). DLL3+ cells are treated with pH-engineered and control ABPC ADCs specific for DLL3 as described herein. After treatment, cells are rinsed with PBS, and then fixed in suspension in 1% methanol-free formaldehyde (Polysciences, Warrington, Pa.) in PBS at 0° C. for 15 min. Cells are resuspended in 70% ethanol for at least 2 h at −20° C. Cells are then washed twice in PBS and suspended in 0.2% Triton X-100 (Sigma) in a 1% (w/v) solution of BSA (Sigma) in PBS for 30 min to suppress nonspecific Ab binding. Cells are centrifuged again (200 g, 5 min) and the cell pellet is suspended in 100 μL of 1% BSA containing 1:800 diluted anti-histone γH2AX polyclonal Ab (Trevigen, Gaithersburg, Md.). The cells are then incubated overnight at 4° C., washed twice with PBS, and resuspended in 100 μL of 1:30 diluted FITC-conjugated F(ab′)2 fragment of swine anti-rabbit immunoglobulin (DAKO, Carpinteria, Calif.) for 30 min at room temperature in the dark. The cells are then counterstained with 5 μg/mL of PI (Molecular Probes, Eugene, Oreg.) dissolved in PBS containing 100 μg/mL of DNase-free RNase A (Sigma), for 20 min at room temperature. Cellular fluorescence of the FITC γH2AX signal and the PI counterstain are measured using flow cytometry using methods known in the art. When comparing cells within the same stage of the cell cycle (based on total DNA content), treated DLL3+ cells can be observed to have an increased FITC γH2AX signal relative to untreated DLL3+ cells (which serve as a baseline). Furthermore, DLL3+ cells treated with pH-engineered ADCs specific for DLL3 can be observed to have a greater increase in levels of γH2AX over baseline than cells treated with a control ABPC ADC specific for DLL3. In addition to the γH2AX assay, DNA cross-linking can be more directly assessed with a Comet assay (Chandna, S. (2004) Cytometry 61A, 127-133).

[0958] In addition, as disclosed herein, pH-engineered and control ABPCs can be assayed using the methods in this example without direct conjugation by performing a secondary ADC assay instead of using primary conjugated ADCs.

### Example 6. Demonstration of Decreased Half-Life of pH-Engineered ABPCs Specific for DLL3 as Compared to a Control ABPC Specific for DLL3

[0959] One of the surprising aspects of the pH-engineered ABPCs specific for DLL3 described by the invention can be their ability to facilitate increased dissociation of ABPCs from the DLL3 within the endosome or lysosome resulting in a decreased serum half-life relative to control ABPCs specific for DLL3 or ABPCs that are not specific for DLL3. This decreased serum half-life is due to the enhanced frequency with which pH-engineered ABPCs specific for DLL3 are cleared from circulation due to their enhanced cellular internalization once bound to DLL3, which over time can be observed through a decrease in serum concentration of unbound pH-engineered ABPC specific for DLL3. To demonstrate these properties, a series of animal studies in mice and/or monkeys is performed using pH-engineered ABPC specific for DLL3 and control ABPC specific for DLL3 using methods known to the art (e.g., Gupta, P., et al. (2016), mAbs, 8:5, 991-997). Briefly, to conduct mouse studies, a single intravenous bolus (e.g., 5 mg/kg) of either pH-engineered ABPC specific for DLL3 or control ABPC specific for DLL3 is administered via tail vein to two groups of NOD SCID mice (e.g. Jackson Labs NOD.CB17-Prkdcscid/J Stock No: 001303) xenografted with a DLL3+ cell line (e.g., as described herein). Xenografted mice are prepared by growing 1-5 million DLL3+ cells in vitro and inoculating subcutaneously into the right flank of the mouse. Tumors are size matched at 300 mm3. Measurements of the length (L) and width (W) of the tumors are taken via electronic caliper and the volume is calculated according to the following equation: V=L×W\hat{ }2/2. Blood samples are collected via retro-orbital bleeds from each group at each of the following time points: 15 m, 30 m, 1 h, 8 h, 24 h, and 3 d, 7 d, 10 d, 14 d, 17 d, 21 d, and 28 d. Samples are processed to collect serum, and antibody concentrations are quantified using ELISA or other methods known to the art (e.g., PAC assay or MAC assay; Fischer, S. K. et al. (2012), mAbs, 4:5, 623-631, utilizing, e.g., anti-human Fc antibody Jackson ImmunoResearch Labs, Cat #109-006-006). Antibody concentrations of pH-engineered ABPC specific for DLL3 and control ABPC specific for DLL3 are plotted as a function of time. Upon analysis of the data, it can be observed that the pH-engineered ABPC specific for DLL3 has a significantly shorter serum half-life relative to control ABPC specific for DLL3, thereby demonstrating the ability of the pH-engineered ABPC specific for DLL3's pH dependence to facilitate an enhanced dissociation within the endosome or lysosome relative to other, similar binders (e.g., control ABPC specific for DLL3) that bind the same antigen but that differ in their pH dependence. If the pH-engineered and control ABPCs specific for DLL3 are cross-reactive with the mouse homolog of DLL3, a similar experiment can be repeated with non-xenografted mice.

[0960] Optionally, if the pH-engineered and control ABPCs specific for DLL3 are cross-reactive with the cynomolgus monkey homolog of DLL3, a similar experiment can be performed on monkeys (e.g., cynomolgus monkeys). An equal number of male and female monkeys (e.g., n=1-2 each) are administered a bolus of either pH-engineered ABPC specific for DLL3 or control ABPC specific for DLL3 at a dose of, e.g., 1 mg/kg via saphenous vein injection. Alternatively, several different doses of DLL3-binding protein are administered across a group of several monkeys. Blood samples are collected via the peripheral vein or femoral vein at intervals similar to those described above, and analyzed for the presence of either pH-engineered ABPC specific for DLL3 or control ABPC specific for DLL3 using methods known to the art (e.g., ELISA). Upon analysis of the data, it can be observed that pH-engineered ABPC specific for DLL3 has a significantly shorter serum half-life relative to control ABPC specific for DLL3, thereby demonstrating the ability of pH-engineered ABPC specific for DLL3 to facilitate an enhanced dissociation within the endosome or lysosome relative to other, similar binders (e.g., control ABPC specific for DLL3) that bind the same antigen but that differ in their pH dependence. In some cases, this effect is observed only in certain doses, whereas in others it is observed across doses.

[0961] In addition, the half-life of pH-engineered and control ABPC ADCs specific for DLL3 can be assessed using the above methods by substituting pH-engineered and control ABPC ADCs specific for DLL3 for the pH-engineered and control ABPCs specific for DLL3 (i.e., studying the ABPCs after conjugation to a drug or toxin, as described herein).

### Example 7. Increased Potency of pH-Engineered ADCs Specific for DLL3 vs. A Control ABPC ADC Specific for DLL3 in Mouse Xenograft Models

[0962] The enhanced anti-tumor activity of the pH-engineered ADCs specific for DLL3 against DLL3+ tumors can be demonstrated in a subcutaneous xenograft model of DLL3+ cells. For the experiments, 1-5 million DLL3+ cells are grown in vitro and inoculated subcutaneously per mouse into the right flank of female immunodeficient (e.g., SCID-Beige or NOD scid) mice. Tumors are size matched at 100-200 mm3, and dosed intraperitoneally (IP) (1 dose given every ˜4-7 days for a total of ˜2-6 doses). Measurements of the length (L) and width (W) of the tumors are taken via electronic caliper and the volume is calculated according to the following equation: V=L×W\hat{ }2/2. A bolus (e.g., 5 mg/kg) of either pH-engineered ADC specific for DLL3 or control ABPC ADC specific for DLL3 is administered via tail vein. Tumor growth inhibition (TGI) and tumor growth delay (TGD) and survival are significantly improved with administration of pH-engineered ADC specific for DLL3 compared to administration of control ABPC ADC specific for DLL3 at the same regimen.

[0963] Optionally, spread of tumor cells into the various tissues is determined in sacrificed animals. Metastasis is measured according to Schneider, T., et al., Clin. Exp. Metas. 19 (2002) 571-582. Briefly, tissues are harvested and human Alu sequences are quantified by real-time PCR. Higher human DNA levels, quantified by real-time PCR, correspond to higher levels of metastasis. Levels of human Alu sequences (correlating to invasion of tumor cells into secondary tissue) are significantly lower in animals treated with pH-engineered ADC specific for DLL3, corresponding to reduced metastasis, compared to mice treated with control ABPC ADC specific for DLL3 at the same regimen. Alternatively, the enhanced anti-tumor activity of the pH-engineered ADC specific for DLL3 can be shown in DLL3+ patient-derived xenograft models (e.g., available from Charles River Laboratories).

### Example 8. Creation of a pH-Engineered Bispecific DLL3 Bispecific ABPC and Demonstration of Exemplary Properties as Compared to a Control Bispecific ABPC

[0964] To create a pH-engineered ABPC specific for DLL3 with modified toxicity and internalization properties, a bispecific antibody that binds two different epitopes on DLL3 is constructed. It is known in the art that biparatopic antibodies can show increased antigen-dependent internalization, and are therefore useful for applications such as antibody-drug conjugates (e.g., see Li et al (2016) A Biparatopic HER2-Targeting Antibody-Drug Conjugate Induces Tumor Regression in Primary Models Refractory to or Ineligible for HER2-Targeted Therapy, Cancer Cell 29:117-29). Briefly, a pH-engineered DLL3×DLL3 bispecific, biparatopic ABPC specific for DLL3 is assembled using light chain/heavy chain pairs from two different pH-engineered ABPCs specific for DLL3, each of which binds a distinct epitope on DLL3 that does not overlap with the other epitope. A set of pH-engineered ABPCs specific for DLL3 that bind non-overlapping epitopes are discovered, e.g., using the methods described herein, or others known to one of ordinary skill in the art. Briefly, two binders are selected on the basis that they bind substantially different epitopes on DLL3, as determined by, e.g., a binding competition assay as in Abdiche Y N et al (2009) Exploring blocking assays using Octet, ProteOn, and Biacore biosensors, Anal Biochem 386:172-80. Alternatively, briefly, as described herein, cell culture supernatants of cells transfected with a first ABPC specific for DLL3 are normalized to an antibody expression level of 50 μg/mL, and captured on an anti-human Fc sensor (Forte Bio). A baseline is established using 1× kinetics buffer (Forte Bio), and the sensor is associated with 50 nM of DLL3 in 1×PBS (that has been mixed and pre-incubated for 30 min at 37 degrees C. with a second ABPC specific for DLL3 transfection supernatant or the first ABPC specific for DLL3 transfection supernatant, both normalized to 50 ug/mL) at pH 7.4 for 300 sec to generate an association curve. If the association rate in the presence of the second ABPC specific for DLL3 is significantly faster (as calculated by the instrument software, or as seen by an elevated level of association over time) than the association rate in the presence of the first ABPC specific for DLL3, then the second ABPC specific for DLL3 is deemed to bind a non-overlapping epitope of DLL3. Optionally, each antibody is screened for its internalization properties when bound to its epitope on a cell expressing DLL3, and well-internalizing antibodies are selected. Assays for determining the internalization rate of a molecule present on the surface of a cell are known to the art. See, e.g., Wiley et al. (1991) J. Biol. Chem. 266: 11083-11094; and Sorkin and Duex (2010) Curr. Protoc. Cell Biol. Chapter, Unit-15.14; Vainshtein et al. (2015) Pharm Res. 32: 286-299. Once selected, heavy and light chain constructs with engineered mutations for heavy and light chain pairing (Spiess et al., “Alternative molecular formats and therapeutic applications of bispecific antibodies,” 2015) are synthesized for both arms. Bispecific ABPCs specific for DLL3 are produced by co-expression of corresponding heavy and light chain plasmids in, e.g., Expi293 cells. Cell culture supernatants are harvested and subjected to Protein A purification. Heterodimeric ABPCs specific for DLL3 are separated from homodimeric species via additional purification steps such as ion exchange chromatography, hydrophobic interaction chromatography, and mixed mode chromatography. The purified pH-engineered DLL3×DLL3 bispecific, biparatopic ABPCs specific for DLL3 are characterized via mass spectrometry to confirm the purity and absence of homodimeric species and size exclusion chromatography to confirm the presence of monomeric antigen-binding protein construct species. For the product antibody, binding to the DLL3 is confirmed via Biacore analysis. Other methods of bispecific antibody production are known to the art and could also be used to create a bispecific antibody, e.g., the DLL3×DLL3 bispecific, biparatopic ABPCs specific for DLL3 described herein (e.g., Labrijn et al (2014) “Controlled Fab-arm exchange for the generation of stable bispecific IgG1” Nature Protocols 9:2450-2463, accessed at http://www.nature.com/nprot/journal/v9/n10/abs/nprot.2014.169.html), as would be apparent to one of ordinary skill in the art. Alternatively, instead of a DLL3×DLL3 ABPC specific for DLL3, a pH-engineered DLL3× BINDER ABPC specific for DLL3 can be constructed using similar methods apparent to one skilled in the art, where BINDER is any antibody that has been published in the art or discovered using methods like those herein or those known in the art (e.g., display-based or immunization-based methods).

[0965] Next, exemplary properties of pH-engineered DLL3×DLL3 ABPCs specific for DLL3 can be demonstrated using the methods described herein, with the appropriate control being a control ABPC monospecific or bispecific ABPC specific for DLL3. Briefly, it can be shown that, as compared to a control, the pH-engineered DLL3×DLL3 ABPCs specific for DLL3: a) bind in a pH-dependent manner to cells, e.g., bind at a neutral pH but not an acidic pH and b) release from cells in a pH-dependent manner, e.g. bind at a neutral pH and release at an acidic pH and c) show enhanced endolysosomal accumulation in DLL3+ cells and d) show increased DLL3 antigen density after exposure to DLL3+ cells and e) when conjugated to a toxin, show increased cytotoxicity to DLL3+ cells and f) when conjugated to a toxin, show increased toxin liberation when incubated with DLL3+ cells and g) show decreased half-life when exposed to DLL3 antigen in a relevant animal model and h) when conjugated to a toxin, show increased efficacy in a mouse xenograft model of DLL3+ cells. Similarly, the exemplary properties of pH-engineered DLL3× BINDER ABPCs specific for DLL3 can be demonstrated using the methods described herein, with the appropriate control being a control ABPC DLL3× BINDER bispecific ABPC specific for DLL3.

### Example 9. Construction and Screening of pH-Engineered DLL3 ABPCs

[0966] Multiple DLL3-binding monoclonal antibodies have been described in the literature and can be used as a template for engineering pH-dependent binding [Saunders L R (2016) “A DLL3-targeted antibody-drug conjugate eradicates high-grade pulmonary neuroendocrine tumor-initiating cells in vivo” Science Translational Medicine 7(302):302ra136]. We selected rovalpituzumab (Heavy chain SEQ ID NO: 1, Light chain SEQ ID NO: 2) as a DLL3-binding monoclonal antibody for pH engineering via histidine scanning. Briefly, CDRs in the heavy chain were identified using the methods described by Kabat et al (Kabat et al. (1992) Sequences of Proteins of Immunological Interest, DIANE publishing) and IMGT (Lefranc M P (1999) “The IMGT unique numbering for Immunoglobulins, T cell receptors and Ig-like domains” The Immunologist 7, 132-136), and for each CDR, residues falling under either or both Kabat and IMGT CDR definitions were called as CDR residues. To generate pH-dependent sequence variants, individual amino acid residues within the heavy chain CDRs were systematically substituted with a histidine, one at a time (MYT0639-MYT0679). In cases where the starting CDR residue was a histidine, it was mutated to an alanine. Antibody variants with only one histidine or alanine mutation in a heavy chain CDR were generated by co-transfection of Expi293 cells with a) one heavy chain sequence variant, and b) the corresponding starting ABPC light chain using methods known to the art. After allowing for four days of protein expression, cell culture supernatants were collected, quantified by SDS-PAGE analysis, and the pH dependence of the variant was evaluated using biolayer interferometry (BLI) on an Octet RED 384 instrument. Briefly, cell culture supernatants were normalized to an antibody expression level of 25 μg/mL, and captured on an anti-human Fc sensor (Forte Bio). A baseline was established using 1×PBST (50 mM Potassium Phosphate Buffer+150 mM NaCl+0.05% Tween 20) pH 7.4, and the sensor was associated with 50 nM of DLL3 (R&D Systems, Cat #9749-DL) in 1×PBST pH 7.4 for 120 sec to generate an association curve. In the dissociation phase, the antibody-antigen complex on the sensor was exposed to 1×PBST pH 7.4 for 300-600 sec. Baseline, association, and dissociation were repeated using 1×MES (100 mM MES Buffer+150 mM NaCl+0.05% Tween 20) pH 5.0 throughout in a separate condition. Association and dissociation phase curves were examined for the starting ABPC antibody and each corresponding antibody variant at pH 5.0 and pH 7.4 to inform on two criteria: a) enhanced dissociation (i.e., higher koff values) at pH 5.0 due to histidine or alanine substitution compared to the starting ABPC, and b) reduced dissociation at pH 7.4 (i.e., lower koff values) compared to pH 5.0 in the antibody variant itself and with the starting ABPC. Heavy chain variants that showed either enhanced dissociation at pH 5.0 or reduced dissociation at pH 7.4 or both were selected for further analysis (e.g., MYT0643, MYT0645, MYT0647-MYT0648, MYT0650-MYT0652, MYT0655-MYT0657, MYT0660, MYT0669-MYT0670, MYT0673, MYT0675, MYT0677, MYT0678). It was also noted that while some histidine and alanine mutations obliterated DLL3 binding (e.g., MYT0649, MYT0654, MYT0671-MYT0672, MYT0676), others were tolerated with little (e.g., less than 1-fold change in dissociation constant KD or dissociation rate) or no change in DLL3 binding kinetics (e.g., MYT0639-MYT0642, MYT0644, MYT0646, MYT0653, MYT0658-MYT0659, MYT0661-MYT0668, MYT0674, MYT0679). Especially because histidine is a large, positively charged amino acid, these variants with no change were noted as positions in the heavy chain that may tolerate a wide range of mutations and lead to antibodies with different sequence but similar binding properties, a designation that is not otherwise apparent.

[0967] Additionally, the above protocol was repeated except as follows. A baseline was established using 1×PBST (50 mM Potassium Phosphate Buffer+150 mM NaCl+0.05% Tween 20) pH 7.4, and the sensor was associated with 50 nM of DLL3 in 1×PBST pH 7.4 for 120 sec to generate an association curve. In the dissociation phase, the antibody-antigen complex on the sensor was exposed to 1×PBST pH 7.4 for 300-600 sec. Baseline, association, and dissociation were repeated using 1×PBST pH 5.4 throughout in a separate condition.

### Example 10. Construction and Screening of pH-Engineered DLL3 ABPCs

[0968] Multiple DLL3-binding monoclonal antibodies have been described in the literature and can be used as a template for engineering pH-dependent binding [Saunders L R (2016) “A DLL3-targeted antibody-drug conjugate eradicates high-grade pulmonary neuroendocrine tumor-initiating cells in vivo” Science Translational Medicine 7(302):302ra136]. ROVALPITUZUMAB (Heavy chain SEQ ID NO: 1, Light chain SEQ ID NO: 2) was selected as a DLL3-binding monoclonal antibody for pH engineering via histidine scanning. Briefly, CDRs in the light chain were identified using the methods described by Kabat et al (Kabat et al. (1992) Sequences of Proteins of Immunological Interest, DIANE publishing) and IMGT (Lefranc M P (1999) “The IMGT unique numbering for Immunoglobulins, T cell receptors and Ig-like domains” The Immunologist 7, 132-136), and for each CDR, residues falling under either or both Kabat and IMGT CDR definitions were called as CDR residues. To generate pH-dependent sequence variants, individual amino acid residues within the light chain CDRs were systematically substituted with a histidine, one at a time (MYT1532-MYT1558). In cases where the starting CDR residue was a histidine, it was mutated to an alanine. Antibody variants with only one histidine or alanine mutation in a light chain CDR were generated by co-transfection of Expi293 cells with a) one light chain sequence variant, and b) the corresponding starting ABPC heavy chain using methods known to the art. After allowing for four days of protein expression, cell culture supernatants were collected, quantified by SDS-PAGE analysis (FIG. 2), and the pH dependence of the variant was evaluated using biolayer interferometry (BLI) on an Octet RED 384 instrument. Briefly, 5 μL of cell culture supernatant was diluted into 195 μL of 1×PBST pH 7.4 for loading onto the sensor tips. Diluted supernatants were then captured on an anti-human Fc sensor (Forte Bio). A baseline was established using 1×PBST (50 mM Potassium Phosphate Buffer+150 mM NaCl+0.05% Tween 20) pH 7.4, and the sensor was associated with 50 nM of DLL3 (R&D Systems, Cat #9749-DL, Lot No. DFSG0719011) in 1×PBST pH 7.4 for 120 sec to generate an association curve. In the dissociation phase, the antibody-antigen complex on the sensor was exposed to 1×PBST pH 7.4 for 300-600 sec. Baseline, association, and dissociation were repeated using 1×PBST pH 5.4 throughout in a separate condition. Association and dissociation phase curves were examined for the starting ABPC antibody (with no substitutions) and each corresponding antibody variant at pH 5.4 and pH 7.4 to inform on two criteria: a) enhanced dissociation (e.g., higher koff values) at pH 5.4 due to histidine or alanine substitution compared to the starting ABPC (with no substitutions), and b) reduced dissociation at pH 7.4 (e.g., lower koff values) compared to pH 5.4 in the antibody variant itself and with the starting ABPC (with no substitutions). Light chain variants that showed either enhanced dissociation at pH 5.4 or reduced dissociation at pH 7.4 or both (as compared to the starting ABPC), as shown in FIG. 5 were selected for further analysis (e.g., MYT1533, MYT1534, MYT1537, MYT1540, MYT1541, MYT1542, MYT1544, MYT1547, MYT1550, MYT1551, MYT1554, MYT1555, MYT1556, MYT1557). It was also noted that while some histidine and alanine mutations obliterated DLL3 binding (e.g., MYT1552), others were tolerated with little (e.g., less than 1-fold change in dissociation constant KD or dissociation rate) or no change in DLL3 binding kinetics (e.g., MYT1532, MYT1535, MYT1536, MYT1538, MYT1539, MYT1543, MYT1545, MYT1546, MYT1548, MYT1549, MYT1553, MYT1558). Especially because histidine is a large, positively charged amino acid, these variants with no change were noted as positions in the light chain that may tolerate a wide range of mutations and lead to antibodies with different sequence but similar binding properties, a designation that is not otherwise apparent.

### Example 11. Construction and Screening of pH-Engineered DLL3 ABPCs

[0969] Multiple DLL3-binding monoclonal antibodies have been described in the literature and can be used as a template for engineering pH-dependent binding [Saunders L R (2016) “A DLL3-targeted antibody-drug conjugate eradicates high-grade pulmonary neuroendocrine tumor-initiating cells in vivo” Science Translational Medicine 7(302):302ra136]. ROVALPITUZUMAB (Heavy chain SEQ ID NO: 1, Light chain SEQ ID NO: 2) was selected as a DLL3-binding monoclonal antibody for pH engineering via histidine scanning. Briefly, CDRs in the heavy chain were identified using the methods described by Kabat et al (Kabat et al. (1992) Sequences of Proteins of Immunological Interest, DIANE publishing) and IMGT (Lefranc M P (1999) “The IMGT unique numbering for Immunoglobulins, T cell receptors and Ig-like domains” The Immunologist 7, 132-136), and for each CDR, residues falling under either or both Kabat and IMGT CDR definitions were called as CDR residues. To generate pH-dependent sequence variants, individual amino acid mutations within the heavy chain CDRs that had been previously selected for further analysis in Example 9 were systematically combined two or more at a time (MYT1182, MYT1183, MYT1185, MYT1186, MYT1187, MYT1188, MYT1189, MYT1190, MYT1192, MYT1193, MYT1194, MYT1195, MYT1196, MYT1198, MYT1199, MYT1200, MYT1201). In cases where the starting CDR residue was a histidine, it was mutated to an alanine. Antibody variants with two or more histidine or alanine mutations in the heavy chain CDRs were generated by co-transfection of Expi293 cells with a) one heavy chain combinations sequence variant, and b) the corresponding starting ABPC light chain using methods known to the art. After allowing for four days of protein expression, cell culture supernatants were collected, quantified by SDS-PAGE analysis (FIGS. 3 and 82), and the pH dependence of the variant was evaluated using biolayer interferometry (BLI) on an Octet RED 384 instrument. Briefly, 5 μL of cell culture supernatant was diluted into 195 μL of 1×PBST pH 7.4 for loading onto the sensor tips. Diluted supernatants were then captured on an anti-human Fc sensor (Forte Bio). A baseline was established using 1×PBST (50 mM Potassium Phosphate Buffer+150 mM NaCl+0.05% Tween 20) pH 7.4, and the sensor was associated with 50 nM of DLL3 (R&D Systems, Cat #9749-DL, Lot No. DFSG0719011) in 1×PBST pH 7.4 for 120 sec to generate an association curve. In the dissociation phase, the antibody-antigen complex on the sensor was exposed to 1×PBST pH 7.4 for 300-600 sec. Baseline, association, and dissociation were repeated using 1×PBST pH 5.4 throughout in a separate condition. Association and dissociation phase curves were examined for the starting ABPC antibody (with no substitutions) and each corresponding antibody variant at pH 5.4 and pH 7.4 to inform on two criteria: a) enhanced dissociation (e.g., higher koff values) at pH 5.4 due to histidine or alanine substitution compared to the starting ABPC (with no substitutions), and b) reduced dissociation at pH 7.4 (e.g., lower koff values) compared to pH 5.4 in the antibody variant itself and with the starting ABPC (with no substitutions). Heavy chain combinations variants that showed either enhanced dissociation at pH 5.4 or reduced dissociation at pH 7.4 or both (as compared to the starting ABPC), as shown in FIGS. 6 and 83 were selected for further analysis (e.g., MYT1182, MYT1183, MYT1185, MYT1186, MYT1187, MYT1188, MYT1189, MYT1190, MYT1192, MYT1193, MYT1194, MYT1195, MYT1196, MYT1198, MYT1199, MYT1200, MYT1201).

### Example 12. Construction and Screening of pH-Engineered DLL3 ABPCs

[0970] Multiple DLL3-binding monoclonal antibodies have been described in the literature and can be used as a template for engineering pH-dependent binding (Saunders L R (2016) “A DLL3-targeted antibody-drug conjugate eradicates high-grade pulmonary neuroendocrine tumor-initiating cells in vivo” Science Translational Medicine 7(302):302ra136). ROVALPITUZUMAB (Heavy chain SEQ ID NO: 1, Light chain SEQ ID NO: 2) was selected as a DLL3-binding monoclonal antibody for pH engineering via histidine scanning. Briefly, CDRs in the light chain were identified using the methods described by Kabat et al (Kabat et al. (1992) Sequences of Proteins of Immunological Interest, DIANE publishing) and IMGT (Lefranc M P (1999) “The IMGT unique numbering for Immunoglobulins, T cell receptors and Ig-like domains” The Immunologist 7, 132-136), and for each CDR, residues falling under either or both Kabat and IMGT CDR definitions were called as CDR residues. To generate pH-dependent sequence variants, individual amino acid mutations within the light chain CDRs that had been previously selected for further analysis in Example 10 were systematically combined two or more at a time (MYT4262-4281). In cases where the starting CDR residue was a histidine, it was mutated to an alanine. Antibody variants with two or more histidine or alanine mutations in the light chain CDRs were generated by co-transfection of Expi293 cells with a) one light chain combinations sequence variant, and b) the corresponding starting ABPC heavy chain using methods known to the art. After allowing for four days of protein expression, cell culture supernatants were collected, quantified by SDS-PAGE analysis (FIG. 12), and the pH dependence of the variant was evaluated using biolayer interferometry (BLI) on an Octet RED 384 or an Octet RED 96e instrument. Briefly, cell culture supernatants were diluted based on qualitative expression level of the variant determined by visual examination of SDS-PAGE gels, 5 μL of cell culture supernatant was diluted into 195 μL of 1×PBST, pH 7.4 for high expressors, 25 μL of cell culture supernatant was diluted into 175 μL of 1×PBST, pH 7.4 for medium expressors and 100 μL of cell culture supernatant was diluted into 100 μL of 1×PBST, pH 7.4 for low expressors for loading onto the sensor tips. Diluted supernatants were then captured on an anti-human Fc sensor (Forte Bio). A baseline was established using 1×PBST (50 mM Potassium Phosphate Buffer+150 mM NaCl+0.05% Tween 20), pH 7.4, and the sensor was associated with 50 nM of DLL3 (R&D Systems, Cat #9749-DL, Lot No. DFSG0719011) in 1× PBST, pH 7.4, for 120 sec to generate an association curve. In the dissociation phase, the antibody-antigen complex on the sensor was exposed to 1×PBST, pH 7.4, for 300-600 sec.

[0971] Baseline, association, and dissociation were repeated using 1×PBST, pH 5.4, throughout in a separate condition. Association and dissociation phase curves were examined for the starting ABPC antibody (with no substitutions) and each corresponding antibody variant at pH 5.4 and pH 7.4 to inform on two criteria: a) enhanced dissociation (e.g., higher koff values) at pH 5.4 due to histidine or alanine substitution compared to the starting ABPC (with no substitutions), and b) reduced dissociation at pH 7.4 (e.g., lower koff values) compared to pH 5.4 in the antibody variant itself and with the starting ABPC (with no substitutions). Light chain combinations variants that showed either enhanced dissociation at pH 5.4 or reduced dissociation at pH 7.4 or both (as compared to the starting ABPC), as shown in FIG. 13 were selected for further analysis (MYT4262-4281).

### Example 13. Construction and Screening of pH-Engineered DLL3 ABPCs

[0972] Multiple DLL3-binding monoclonal antibodies have been described in the literature and can be used as a template for engineering pH-dependent binding (Saunders L R (2016) “A DLL3-targeted antibody-drug conjugate eradicates high-grade pulmonary neuroendocrine tumor-initiating cells in vivo” Science Translational Medicine 7(302):302ra136). ROVALPITUZUMAB (Heavy chain SEQ ID NO: 1, Light chain SEQ ID NO: 2) was selected as a DLL3-binding monoclonal antibody for pH engineering via histidine scanning. Briefly, CDRs in the heavy and light chains were identified using the methods described by Kabat et al (Kabat et al. (1992) Sequences of Proteins of Immunological Interest, DIANE publishing) and IMGT (Lefranc M P (1999) “The IMGT unique numbering for Immunoglobulins, T cell receptors and Ig-like domains” The Immunologist 7, 132-136), and for each CDR, residues falling under either or both Kabat and IMGT CDR definitions were called as CDR residues. To generate pH-dependent sequence variants, individual amino acid mutations within the heavy and light chain CDRs that had been previously selected for further analysis in Examples 9-12 were systematically combined two or more at a time (MYT2800-2845). In cases where the starting CDR residue was a histidine, it was mutated to an alanine. Antibody variants with two or more histidine or alanine mutations were generated by co-transfection of Expi293 cells with a) one light chain sequence variant, and b) one heavy chain sequence variant or heavy chain combinations sequence variant using methods known to the art. After allowing for four days of protein expression, cell culture supernatants were collected, quantified by SDS-PAGE analysis (FIG. 14), and the pH dependence of the variant was evaluated using biolayer interferometry (BLI) on an Octet RED 384 or an Octet RED 96e instrument. Briefly, cell culture supernatants were diluted based on qualitative expression level of the variant determined by visual examination of SDS-PAGE gels, 5 μL of cell culture supernatant was diluted into 195 μL of 1×PBST, pH 7.4 for high expressors, 25 μL of cell culture supernatant was diluted into 175 μL of 1×PBST, pH 7.4 for medium expressors and 100 μL of cell culture supernatant was diluted into 100 μL of 1×PBST, pH 7.4 for low expressors for loading onto the sensor tips. Diluted supernatants were then captured on an anti-human Fc sensor (Forte Bio). A baseline was established using 1×PBST (50 mM Potassium Phosphate Buffer+150 mM NaCl+0.05% Tween 20), pH 7.4, and the sensor was associated with 50 nM of DLL3 (R&D Systems, Cat #9749-DL, Lot No. DFSG0719011) in 1×PBST, pH 7.4, for 120 sec to generate an association curve. In the dissociation phase, the antibody-antigen complex on the sensor was exposed to 1×PBST, pH 7.4, for 300-600 sec. Baseline, association, and dissociation were repeated using 1×PBST, pH 5.4, throughout in a separate condition. Association and dissociation phase curves were examined for the starting ABPC antibody (with no substitutions) and each corresponding antibody variant at pH 5.4 and pH 7.4 to inform on two criteria: a) enhanced dissociation (e.g., higher koff values) at pH 5.4 due to histidine or alanine substitution compared to the starting ABPC (with no substitutions), and b) reduced dissociation at pH 7.4 (e.g., lower koff values) compared to pH 5.4 in the antibody variant itself and with the starting ABPC (with no substitutions). Paired heavy and light chain variants that showed either enhanced dissociation at pH 5.4 or reduced dissociation at pH 7.4 or both (as compared to the starting ABPC), as shown in FIG. 15, were selected for further analysis (MYT2800-2845).

### Example 14. Construction and Screening of pH-Engineered DLL3 ABPCs

[0973] Multiple DLL3-binding monoclonal antibodies have been described in the literature and can be used as a template for engineering pH-dependent binding [Saunders L R (2016) “A DLL3-targeted antibody-drug conjugate eradicates high-grade pulmonary neuroendocrine tumor-initiating cells in vivo” Science Translational Medicine 7(302):302ra136]. SC16.4 (U.S. Pat. No. 9,089,617 B2) (Heavy chain SEQ ID NO: 119, Light chain SEQ ID NO: 120) was selected as a DLL3-binding monoclonal antibody for pH engineering via histidine scanning. Briefly, CDRs in the heavy chain were identified using the methods described by Kabat et al (Kabat et al. (1992) Sequences of Proteins of Immunological Interest, DIANE publishing) and IMGT (Lefranc M P (1999) “The IMGT unique numbering for Immunoglobulins, T cell receptors and Ig-like domains” The Immunologist 7, 132-136), and for each CDR, residues falling under either or both Kabat and IMGT CDR definitions were called as CDR residues. To generate pH-dependent sequence variants, individual amino acid residues within the heavy chain CDRs were systematically substituted with a histidine, one at a time (MYT3048-MYT3084). In cases where the starting CDR residue was a histidine, it was mutated to an alanine. Antibody variants with only one histidine or alanine mutation in a heavy chain CDR were generated by co-transfection of Expi293 cells with a) one heavy chain sequence variant, and b) the corresponding starting ABPC light chain using methods known to the art. After allowing for four days of protein expression, cell culture supernatants were collected, quantified by SDS-PAGE (FIG. 23) analysis, and the pH dependence of the variant was evaluated using biolayer interferometry (BLI) on an Octet RED 96e instrument. Briefly, cell culture supernatants were diluted based on qualitative expression level of the variant determined by visual examination of SDS-PAGE gels, 5 μL of cell culture supernatant was diluted into 195 μL of 1×PBST, pH 7.4 for high expressors, 25 μL of cell culture supernatant was diluted into 175 μL of 1×PBST, pH 7.4 for medium expressors and 100 μL of cell culture supernatant was diluted into 100 μL of 1×PBST, pH 7.4 for low expressors for loading onto the sensor tips. Diluted supernatants were then captured on an anti-human Fc sensor (Forte Bio). A baseline was established using 1×PBST (50 mM Potassium Phosphate Buffer+150 mM NaCl+0.05% Tween 20), pH 7.4, and the sensor was associated with 50 nM of DLL3 (R&D Systems, Cat #9749-DL) in 1×PBST, pH 7.4, for 120 sec to generate an association curve. In the dissociation phase, the antibody-antigen complex on the sensor was exposed to 1×PBST, pH 7.4, for 300-600 sec. Baseline, association, and dissociation were repeated using 1×PBST, pH 5.4, throughout in a separate condition. Association and dissociation phase curves were examined for the starting ABPC antibody (with no substitutions) and each corresponding antibody variant at pH 5.4 and pH 7.4 to inform on two criteria: a) enhanced dissociation (e.g., higher koff values) at pH 5.4 due to histidine or alanine substitution compared to the starting ABPC (with no substitutions), and b) reduced dissociation at pH 7.4 (i.e., lower koff values) compared to pH 5.4 in the antibody variant itself and with the starting ABPC (with no substitutions). Heavy chain variants that showed either enhanced dissociation at pH 5.4 or reduced dissociation at pH 7.4 or both (as compared to the starting ABPC), as shown in FIG. 24, were selected for further analysis (MYT3054, MYT3057, MYT3058, MYT3060, MYT3061, MYT3065, MYT3066, MYT3067, MYT3068, MYT3070, MYT3072, MYT3073, MYT3075, MYT3076, MYT3077, MYT3078, MYT3080, MYT3082, MYT3083, and MYT3084). It was also noted that while some histidine and alanine mutations obliterated DLL3 binding (e.g., MYT3055, MYT3079, and MYT3081), others were tolerated with little (e.g., less than 1-fold change in dissociation constant KD or dissociation rate) or no change in DLL3 binding kinetics (e.g., MYT3048, MYT3049, MYT3050, MYT3051, MYT3052, MYT3053, MYT3056, MYT3059, MYT3062, MYT3063, MYT3064, MYT3069, MYT3071, and MYT3074) Especially because histidine is a large, positively charged amino acid, these variants with no change were noted as positions in the light chain that may tolerate a wide range of mutations and lead to antibodies with different sequence but similar binding properties, a designation that is not otherwise apparent.

### Example 15. Construction and Screening of pH-Engineered DLL3 ABPCs

[0974] Multiple DLL3-binding monoclonal antibodies have been described in the literature and can be used as a template for engineering pH-dependent binding (Saunders L R (2016) “A DLL3-targeted antibody-drug conjugate eradicates high-grade pulmonary neuroendocrine tumor-initiating cells in vivo” Science Translational Medicine 7(302):302ra136). SC16.4 (U.S. Pat. No. 9,089,617 B2) (Heavy chain SEQ ID NO: 119, Light chain SEQ ID NO: 120) was selected as a DLL3-binding monoclonal antibody for pH engineering via histidine scanning. Briefly, CDRs in the light chain were identified using the methods described by Kabat et al (Kabat et al. (1992) Sequences of Proteins of Immunological Interest, DIANE publishing) and IMGT (Lefranc M P (1999) “The IMGT unique numbering for Immunoglobulins, T cell receptors and Ig-like domains” The Immunologist 7, 132-136), and for each CDR, residues falling under either or both Kabat and IMGT CDR definitions were called as CDR residues. To generate pH-dependent sequence variants, individual amino acid residues within the light chain CDRs were systematically substituted with a histidine, one at a time (MYT3085-MYT3110 and MYT4200). In cases where the starting CDR residue was a histidine, it was mutated to an alanine. Antibody variants with only one histidine or alanine mutation in a light chain CDR were generated by co-transfection of Expi293 cells with a) one light chain sequence variant, and b) the corresponding starting ABPC heavy chain using methods known to the art. After allowing for four days of protein expression, cell culture supernatants were collected, quantified by SDS-PAGE analysis (FIG. 25), and the pH dependence of the variant was evaluated using biolayer interferometry (BLI) on an Octet RED 96e instrument. Briefly, cell culture supernatants were diluted based on qualitative expression level of the variant determined by visual examination of SDS-PAGE gels, 5 μL of cell culture supernatant was diluted into 195 μL of 1×PBST, pH 7.4 for high expressors, 25 μL of cell culture supernatant was diluted into 175 μL of 1×PBST, pH 7.4 for medium expressors and 100 μL of cell culture supernatant was diluted into 100 μL of 1×PBST, pH 7.4 for low expressors for loading onto the sensor tips. Diluted supernatants were then captured on an anti-human Fc sensor (Forte Bio). A baseline was established using 1×PBST (50 mM Potassium Phosphate Buffer+150 mM NaCl+0.05% Tween 20), pH 7.4, and the sensor was associated with 50 nM of DLL3 (R&D Systems, Cat #9749-DL, Lot No. DFSG0719011) in 1×PBST, pH 7.4, for 120 sec to generate an association curve. In the dissociation phase, the antibody-antigen complex on the sensor was exposed to 1×PBST, pH 7.4, for 300-600 sec. Baseline, association, and dissociation were repeated using 1×PBST, pH 5.4, throughout in a separate condition. Association and dissociation phase curves were examined for the starting ABPC antibody (with no substitutions) and each corresponding antibody variant at pH 5.4 and pH 7.4 to inform on two criteria: a) enhanced dissociation (e.g., higher koff values) at pH 5.4 due to histidine or alanine substitution compared to the starting ABPC (with no substitutions), and b) reduced dissociation at pH 7.4 (e.g., lower koff values) compared to pH 5.4 in the antibody variant itself and with the starting ABPC (with no substitutions). Light chain variants that showed either enhanced dissociation at pH 5.4 or reduced dissociation at pH 7.4 or both (as compared to the starting ABPC), as shown in FIG. 26, were selected for further analysis (e.g., MYT3090, MYT3093, MYT3095, MYT3104, MYT3105, MYT3106, MYT3107, and MYT3109). It was also noted that while no histidine or alanine mutations obliterated DLL3 binding, others were tolerated with little (e.g., less than 1-fold change in dissociation constant KD or dissociation rate) or no change in DLL3 binding kinetics (e.g., MYT3085, MYT3086, MYT3087, MYT3088, MYT3089, MYT3091, MYT3092, MYT3094, MYT3096, MYT3097, MYT3098, MYT3099, MYT3100, MYT3101, MYT3102, MYT3103, MYT3108, and MYT3110). Especially because histidine is a large, positively charged amino acid, these variants with no change were noted as positions in the light chain that may tolerate a wide range of mutations and lead to antibodies with different sequence but similar binding properties, a designation that is not otherwise apparent.

### Example 16. Construction and Screening of pH-Engineered DLL3 ABPCs

[0975] Multiple DLL3-binding monoclonal antibodies have been described in the literature and can be used as a template for engineering pH-dependent binding (Saunders L R (2016) “A DLL3-targeted antibody-drug conjugate eradicates high-grade pulmonary neuroendocrine tumor-initiating cells in vivo” Science Translational Medicine 7(302):302ra136). SC16.4 (U.S. Pat. No. 9,089,617 B2) (Heavy chain SEQ ID NO: 119, Light chain SEQ ID NO: 120) was selected as a DLL3-binding monoclonal antibody for pH engineering via histidine scanning. Briefly, CDRs in the heavy chain were identified using the methods described by Kabat et al (Kabat et al. (1992) Sequences of Proteins of Immunological Interest, DIANE publishing) and IMGT (Lefranc M P (1999) “The IMGT unique numbering for Immunoglobulins, T cell receptors and Ig-like domains” The Immunologist 7, 132-136), and for each CDR, residues falling under either or both Kabat and IMGT CDR definitions were called as CDR residues. To generate pH-dependent sequence variants, individual amino acid mutations within the heavy chain CDRs that had been previously selected for further analysis in Example 14 were systematically combined two or more at a time (MYT3399-MYT3424 and MYT4175-MYT4189). In cases where the starting CDR residue was a histidine, it was mutated to an alanine. Antibody variants with two or more histidine or alanine mutations in the heavy chain CDRs were generated by co-transfection of Expi293 cells with a) one heavy chain combinations sequence variant, and b) the corresponding starting ABPC light chain using methods known to the art. After allowing for four days of protein expression, cell culture supernatants were collected, quantified by SDS-PAGE analysis (FIG. 27), and the pH dependence of the variant was evaluated using biolayer interferometry (BLI) on an Octet RED 384 instrument. Briefly, cell culture supernatants were diluted based on qualitative expression level of the variant determined by visual examination of SDS-PAGE gels, 5 μL of cell culture supernatant was diluted into 195 μL of 1×PBST, pH 7.4 for high expressors, 25 μL of cell culture supernatant was diluted into 175 μL of 1×PBST, pH 7.4 for medium expressors and 100 μL of cell culture supernatant was diluted into 100 μL of 1×PBST, pH 7.4 for low expressors for loading onto the sensor tips. Diluted supernatants were then captured on an anti-human Fc sensor (Forte Bio). A baseline was established using 1×PBST (50 mM Potassium Phosphate Buffer+150 mM NaCl+0.05% Tween 20), pH 7.4, and the sensor was associated with 50 nM of DLL3 (R&D Systems, Cat #9749-DL, Lot No. DFSG0719011) in 1×PBST, pH 7.4, for 120 sec to generate an association curve. In the dissociation phase, the antibody-antigen complex on the sensor was exposed to 1×PBST, pH 7.4, for 300-600 sec. Baseline, association, and dissociation were repeated using 1×PBST, pH 5.4, throughout in a separate condition. Association and dissociation phase curves were examined for the starting ABPC antibody (with no substitutions) and each corresponding antibody variant at pH 5.4 and pH 7.4 to inform on two criteria: a) enhanced dissociation (e.g., higher koff values) at pH 5.4 due to histidine or alanine substitution compared to the starting ABPC (with no substitutions), and b) reduced dissociation at pH 7.4 (e.g., lower koff values) compared to pH 5.4 in the antibody variant itself and with the starting ABPC (with no substitutions). Heavy chain combinations variants that showed either enhanced dissociation at pH 5.4 or reduced dissociation at pH 7.4 or both (as compared to the starting ABPC), as shown in FIG. 28, were selected for further analysis (e.g., MYT3399-MYT3424, MYT4175, MYT4176, MYT4177, MYT4178, MYT4180, MYT4181, MYT4182, MYT4184, MYT4185, and MYT4187).

### Example 17. Construction and Screening of pH-Engineered DLL3 ABPCs

[0976] Multiple DLL3-binding monoclonal antibodies have been described in the literature and can be used as a template for engineering pH-dependent binding (Saunders L R (2016) “A DLL3-targeted antibody-drug conjugate eradicates high-grade pulmonary neuroendocrine tumor-initiating cells in vivo” Science Translational Medicine 7(302):302ra136). SC16.4 (U.S. Pat. No. 9,089,617 B2) (Heavy chain SEQ ID NO: 119, Light chain SEQ ID NO: 120) was selected as a DLL3-binding monoclonal antibody for pH engineering via histidine scanning. Briefly, CDRs in the light chain were identified using the methods described by Kabat et al (Kabat et al. (1992) Sequences of Proteins of Immunological Interest, DIANE publishing) and IMGT (Lefranc M P (1999) “The IMGT unique numbering for Immunoglobulins, T cell receptors and Ig-like domains” The Immunologist 7, 132-136), and for each CDR, residues falling under either or both Kabat and IMGT CDR definitions were called as CDR residues. To generate pH-dependent sequence variants, individual amino acid mutations within the light chain CDRs that had been previously selected for further analysis in Example 15 were systematically combined two or more at a time (MYT4190-4199). In cases where the starting CDR residue was a histidine, it was mutated to an alanine. Antibody variants with two or more histidine or alanine mutations in the light chain CDRs were generated by co-transfection of Expi293 cells with a) one light chain combinations sequence variant, and b) the corresponding starting ABPC heavy chain using methods known to the art. After allowing for four days of protein expression, cell culture supernatants were collected, quantified by SDS-PAGE analysis (FIG. 29), and the pH dependence of the variant was evaluated using biolayer interferometry (BLI) on an Octet RED 384 or an Octet RED 96e instrument. Briefly, cell culture supernatants were diluted based on qualitative expression level of the variant determined by visual examination of SDS-PAGE gels, 5 μL of cell culture supernatant was diluted into 195 μL of 1×PBST, pH 7.4 for high expressors, 25 μL of cell culture supernatant was diluted into 175 μL of 1×PBST, pH 7.4 for medium expressors and 100 μL of cell culture supernatant was diluted into 100 μL of 1×PBST, pH 7.4 for low expressors for loading onto the sensor tips. Diluted supernatants were then captured on an anti-human Fc sensor (Forte Bio). A baseline was established using 1×PBST (50 mM Potassium Phosphate Buffer+150 mM NaCl+0.05% Tween 20), pH 7.4, and the sensor was associated with 50 nM of DLL3 (R&D Systems, Cat #9749-DL, Lot No. DFSG0719011) in 1×PBST, pH 7.4, for 120 sec to generate an association curve. In the dissociation phase, the antibody-antigen complex on the sensor was exposed to 1×PBST, pH 7.4, for 300-600 sec. Baseline, association, and dissociation were repeated using 1×PBST, pH 5.4, throughout in a separate condition. Association and dissociation phase curves were examined for the starting ABPC antibody (with no substitutions) and each corresponding antibody variant at pH 5.4 and pH 7.4 to inform on two criteria: a) enhanced dissociation (e.g., higher koff values) at pH 5.4 due to histidine or alanine substitution compared to the starting ABPC (with no substitutions), and b) reduced dissociation at pH 7.4 (e.g., lower koff values) compared to pH 5.4 in the antibody variant itself and with the starting ABPC (with no substitutions). Light chain combinations variants that showed either enhanced dissociation at pH 5.4 or reduced dissociation at pH 7.4 or both (as compared to the starting ABPC), as shown in FIG. 30 were selected for further analysis (MYT4190-4199).

### Example 18. Construction and Screening of pH-Engineered DLL3 ABPCs

[0977] Multiple DLL3-binding monoclonal antibodies have been described in the literature and can be used as a template for engineering pH-dependent binding (Saunders L R (2016) “A DLL3-targeted antibody-drug conjugate eradicates high-grade pulmonary neuroendocrine tumor-initiating cells in vivo” Science Translational Medicine 7(302):302ra136). SC16.4 (U.S. Pat. No. 9,089,617 B2) (Heavy chain SEQ ID NO: 119, Light chain SEQ ID NO: 120) was selected as a DLL3-binding monoclonal antibody for pH engineering via histidine scanning. Briefly, CDRs in the heavy and light chains were identified using the methods described by Kabat et al (Kabat et al. (1992) Sequences of Proteins of Immunological Interest, DIANE publishing) and IMGT (Lefranc M P (1999) “The IMGT unique numbering for Immunoglobulins, T cell receptors and Ig-like domains” The Immunologist 7, 132-136), and for each CDR, residues falling under either or both Kabat and IMGT CDR definitions were called as CDR residues. To generate pH-dependent sequence variants, individual amino acid mutations within the heavy and light chain CDRs that had been previously selected for further analysis in Examples 14-17 were systematically combined two or more at a time (MYT3493-3513). In cases where the starting CDR residue was a histidine, it was mutated to an alanine. Antibody variants with two or more histidine or alanine mutations were generated by co-transfection of Expi293 cells with a) one light chain sequence variant, and b) one heavy chain sequence variant using methods known to the art. After allowing for four days of protein expression, cell culture supernatants were collected, quantified by SDS-PAGE analysis (FIG. 31), and the pH dependence of the variant was evaluated using biolayer interferometry (BLI) on an Octet RED 384 or an Octet RED 96e instrument. Briefly, cell culture supernatants were diluted based on qualitative expression level of the variant determined by visual examination of SDS-PAGE gels, 5 μL of cell culture supernatant was diluted into 195 μL of 1×PBST, pH 7.4 for high expressors, 25 μL of cell culture supernatant was diluted into 175 μL of 1×PBST, pH 7.4 for medium expressors and 100 μL of cell culture supernatant was diluted into 100 μL of 1×PBST, pH 7.4 for low expressors for loading onto the sensor tips. Diluted supernatants were then captured on an anti-human Fc sensor (Forte Bio). A baseline was established using 1×PBST (50 mM Potassium Phosphate Buffer+150 mM NaCl+0.05% Tween 20), pH 7.4, and the sensor was associated with 50 nM of DLL3 (R&D Systems, Cat #9749-DL, Lot No. DFSG0719011) in 1×PBST, pH 7.4, for 120 sec to generate an association curve. In the dissociation phase, the antibody-antigen complex on the sensor was exposed to 1×PBST, pH 7.4, for 300-600 sec. Baseline, association, and dissociation were repeated using 1×PBST, pH 5.4, throughout in a separate condition. Association and dissociation phase curves were examined for the starting ABPC antibody (with no substitutions) and each corresponding antibody variant at pH 5.4 and pH 7.4 to inform on two criteria: a) enhanced dissociation (e.g., higher koff values) at pH 5.4 due to histidine or alanine substitution compared to the starting ABPC (with no substitutions), and b) reduced dissociation at pH 7.4 (e.g., lower koff values) compared to pH 5.4 in the antibody variant itself and with the starting ABPC (with no substitutions). Paired heavy and light chain variants that showed either enhanced dissociation at pH 5.4 or reduced dissociation at pH 7.4 or both (as compared to the starting ABPC), as shown in FIG. 32, were selected for further analysis (MYT3493-MYT3513).

### Example 19. Construction and Screening of pH-Engineered DLL3 ABPCs

[0978] Multiple DLL3-binding monoclonal antibodies have been described in the literature and can be used as a template for engineering pH-dependent binding (Saunders L R (2016) “A DLL3-targeted antibody-drug conjugate eradicates high-grade pulmonary neuroendocrine tumor-initiating cells in vivo” Science Translational Medicine 7(302):302ra136). hSC16.13 (U.S. Pat. No. 9,089,617 B2) (Heavy chain SEQ ID NO: 236, Light chain SEQ ID NO: 237) was selected as a DLL3-binding monoclonal antibody for pH engineering via histidine scanning. Briefly, CDRs in the heavy chain were identified using the methods described by Kabat et al (Kabat et al. (1992) Sequences of Proteins of Immunological Interest, DIANE publishing) and IMGT (Lefranc M P (1999) “The IMGT unique numbering for Immunoglobulins, T cell receptors and Ig-like domains” The Immunologist 7, 132-136), and for each CDR, residues falling under either or both Kabat and IMGT CDR definitions were called as CDR residues. To generate pH-dependent sequence variants, individual amino acid residues within the heavy chain CDRs were systematically substituted with a histidine, one at a time (MYT3182-MYT3225). In cases where the starting CDR residue was a histidine, it was mutated to an alanine. Antibody variants with only one histidine or alanine mutation in a heavy chain CDR were generated by co-transfection of Expi293 cells with a) one heavy chain sequence variant, and b) the corresponding starting ABPC light chain using methods known to the art. After allowing for four days of protein expression, cell culture supernatants were collected, quantified by SDS-PAGE (FIG. 33) analysis, and the pH dependence of the variant was evaluated using biolayer interferometry (BLI) on an Octet RED 96e instrument. Briefly, cell culture supernatants were diluted based on qualitative expression level of the variant determined by visual examination of SDS-PAGE gels, 5 μL of cell culture supernatant was diluted into 195 μL of 1×PBST, pH 7.4 for high expressors, 25 μL of cell culture supernatant was diluted into 175 μL of 1×PBST, pH 7.4 for medium expressors and 100 μL of cell culture supernatant was diluted into 100 μL of 1×PBST, pH 7.4 for low expressors for loading onto the sensor tips. Diluted supernatants were then captured on an anti-human Fc sensor (Forte Bio). A baseline was established using 1×PBST (50 mM Potassium Phosphate Buffer+150 mM NaCl+0.05% Tween 20), pH 7.4, and the sensor was associated with 50 nM of DLL3 (R&D Systems, Cat #9749-DL) in 1×PBST, pH 7.4, for 120 sec to generate an association curve. In the dissociation phase, the antibody-antigen complex on the sensor was exposed to 1×PBST, pH 7.4, for 300-600 sec. Baseline, association, and dissociation were repeated using 1×PBST, pH 5.4, throughout in a separate condition. Association and dissociation phase curves were examined for the starting ABPC antibody (with no substitutions) and each corresponding antibody variant at pH 5.4 and pH 7.4 to inform on two criteria: a) enhanced dissociation (e.g., higher koff values) at pH 5.4 due to histidine or alanine substitution compared to the starting ABPC (with no substitutions), and b) reduced dissociation at pH 7.4 (e.g., lower koff values) compared to pH 5.4 in the antibody variant itself and with the starting ABPC (with no substitutions). Heavy chain variants that showed either enhanced dissociation at pH 5.4 or reduced dissociation at pH 7.4 or both (as compared to the starting ABPC), as shown in FIG. 34, were selected for further analysis (MYT3183, MYT3185, MYT3187, MYT3189-MYT3194, MYT3196, MYT3197, MYT3198, MYT3200, MYT3202, MYT3210, MYT3212, MYT3214, MYT3218, MYT3220, and MYT3222). It was also noted that while no histidine or alanine mutations obliterated DLL3 binding, others were tolerated with little (e.g., less than 1-fold change in dissociation constant KD or dissociation rate) or no change in DLL3 binding kinetics (e.g., MYT3182, MYT3184, MYT3186, MYT3188, MYT3195, MYT3199, MYT3201, MYT3203, MYT3204, MYT3205, MYT3206, MYT3207, MYT3208, MYT3209, MYT3211, MYT3213, MYT3215, MYT3216, MYT3217, MYT3219, MYT3221, MYT3223, MYT3224, and MYT3225). Especially because histidine is a large, positively charged amino acid, these variants with no change were noted as positions in the light chain that may tolerate a wide range of mutations and lead to antibodies with different sequence but similar binding properties, a designation that is not otherwise apparent.

### Example 20. Construction and Screening of pH-Engineered DLL3 ABPCs

[0979] Multiple DLL3-binding monoclonal antibodies have been described in the literature and can be used as a template for engineering pH-dependent binding (Saunders L R (2016) “A DLL3-targeted antibody-drug conjugate eradicates high-grade pulmonary neuroendocrine tumor-initiating cells in vivo” Science Translational Medicine 7(302):302ra136). hSC16.13 (U.S. Pat. No. 9,089,617 B2) (Heavy chain SEQ ID NO: 236, Light chain SEQ ID NO: 237) was selected as a DLL3-binding monoclonal antibody for pH engineering via histidine scanning. Briefly, CDRs in the light chain were identified using the methods described by Kabat et al (Kabat et al. (1992) Sequences of Proteins of Immunological Interest, DIANE publishing) and IMGT (Lefranc M P (1999) “The IMGT unique numbering for Immunoglobulins, T cell receptors and Ig-like domains” The Immunologist 7, 132-136), and for each CDR, residues falling under either or both Kabat and IMGT CDR definitions were called as CDR residues. To generate pH-dependent sequence variants, individual amino acid residues within the light chain CDRs were systematically substituted with a histidine, one at a time (MYT3226-MYT3251). In cases where the starting CDR residue was a histidine, it was mutated to an alanine. Antibody variants with only one histidine or alanine mutation in a light chain CDR were generated by co-transfection of Expi293 cells with a) one light chain sequence variant, and b) the corresponding starting ABPC heavy chain using methods known to the art. After allowing for four days of protein expression, cell culture supernatants were collected, quantified by SDS-PAGE analysis (FIG. 35), and the pH dependence of the variant was evaluated using biolayer interferometry (BLI) on an Octet RED 96e instrument. Briefly, cell culture supernatants were diluted based on qualitative expression level of the variant determined by visual examination of SDS-PAGE gels, 5 μL of cell culture supernatant was diluted into 195 μL of 1×PBST, pH 7.4 for high expressors, 25 μL of cell culture supernatant was diluted into 175 μL of 1×PBST, pH 7.4 for medium expressors and 100 μL of cell culture supernatant was diluted into 100 μL of 1×PBST, pH 7.4 for low expressors for loading onto the sensor tips. Diluted supernatants were then captured on an anti-human Fc sensor (Forte Bio). A baseline was established using 1×PBST (50 mM Potassium Phosphate Buffer+150 mM NaCl+0.05% Tween 20), pH 7.4, and the sensor was associated with 50 nM of DLL3 (R&D Systems, Cat #9749-DL, Lot No. DFSG0719011) in 1×PBST, pH 7.4, for 120 sec to generate an association curve. In the dissociation phase, the antibody-antigen complex on the sensor was exposed to 1×PBST, pH 7.4, for 300-600 sec. Baseline, association, and dissociation were repeated using 1×PBST, pH 5.4, throughout in a separate condition. Association and dissociation phase curves were examined for the starting ABPC antibody (with no substitutions) and each corresponding antibody variant at pH 5.4 and pH 7.4 to inform on two criteria: a) enhanced dissociation (e.g., higher koff values) at pH 5.4 due to histidine or alanine substitution compared to the starting ABPC (with no substitutions), and b) reduced dissociation at pH 7.4 (e.g., lower koff values) compared to pH 5.4 in the antibody variant itself and with the starting ABPC (with no substitutions). Light chain variants that showed either enhanced dissociation at pH 5.4 or reduced dissociation at pH 7.4 or both (as compared to the starting ABPC), as shown in FIG. 36, were selected for further analysis (e.g., MYT3227, MYT3231, MYT3234, MYT3235, MYT3236, MYT3237, MYT3245, MYT3246, MYT3248, and MYT3250). It was also noted that while some histidine and alanine mutations obliterated DLL3 binding (e.g., MYT3249), others were tolerated with little (e.g., less than 1-fold change in dissociation constant KD or dissociation rate) or no change in DLL3 binding kinetics (e.g., MYT3226, MYT3228, MYT3229, MYT3230, MYT3232, MYT3233, MYT3238, MYT3239, MYT3240, MYT3241, MYT3242, MYT3243, MYT3244, MYT3247, and MYT3251). Especially because histidine is a large, positively charged amino acid, these variants with no change were noted as positions in the light chain that may tolerate a wide range of mutations and lead to antibodies with different sequence but similar binding properties, a designation that is not otherwise apparent.

### Example 21. Construction and Screening of pH-Engineered DLL3 ABPCs

[0980] Multiple DLL3-binding monoclonal antibodies have been described in the literature and can be used as a template for engineering pH-dependent binding (Saunders L R (2016) “A DLL3-targeted antibody-drug conjugate eradicates high-grade pulmonary neuroendocrine tumor-initiating cells in vivo” Science Translational Medicine 7(302):302ra136). hSC16.13 (U.S. Pat. No. 9,089,617 B2) (Heavy chain SEQ ID NO: 236, Light chain SEQ ID NO: 237) was selected as a DLL3-binding monoclonal antibody for pH engineering via histidine scanning. Briefly, CDRs in the heavy chain were identified using the methods described by Kabat et al (Kabat et al. (1992) Sequences of Proteins of Immunological Interest, DIANE publishing) and IMGT (Lefranc M P (1999) “The IMGT unique numbering for Immunoglobulins, T cell receptors and Ig-like domains” The Immunologist 7, 132-136), and for each CDR, residues falling under either or both Kabat and IMGT CDR definitions were called as CDR residues. To generate pH-dependent sequence variants, individual amino acid mutations within the heavy chain CDRs that had been previously selected for further analysis in Example 19 were systematically combined two or more at a time (MYT4346-MYT4371). In cases where the starting CDR residue was a histidine, it was mutated to an alanine. Antibody variants with two or more histidine or alanine mutations in the heavy chain CDRs were generated by co-transfection of Expi293 cells with a) one heavy chain combinations sequence variant, and b) the corresponding starting ABPC light chain using methods known to the art. After allowing for four days of protein expression, cell culture supernatants were collected, quantified by SDS-PAGE analysis (FIG. 37), and the pH dependence of the variant was evaluated using biolayer interferometry (BLI) on an Octet RED 96einstrument. Briefly, cell culture supernatants were diluted based on qualitative expression level of the variant determined by visual examination of SDS-PAGE gels, 5 μL of cell culture supernatant was diluted into 195 μL of 1×PBST, pH 7.4 for high expressors, 25 μL of cell culture supernatant was diluted into 175 μL of 1×PBST, pH 7.4 for medium expressors and 100 μL of cell culture supernatant was diluted into 100 μL of 1×PBST, pH 7.4 for low expressors for loading onto the sensor tips. Diluted supernatants were then captured on an anti-human Fc sensor (Forte Bio). A baseline was established using 1×PBST (50 mM Potassium Phosphate Buffer+150 mM NaCl+0.05% Tween 20), pH 7.4, and the sensor was associated with 50 nM of DLL3 (R&D Systems, Cat #9749-DL, Lot No. DFSG0719011) in 1×PBST, pH 7.4, for 120 sec to generate an association curve. In the dissociation phase, the antibody-antigen complex on the sensor was exposed to 1×PBST, pH 7.4, for 300-600 sec. Baseline, association, and dissociation were repeated using 1×PBST, pH 5.4, throughout in a separate condition. Association and dissociation phase curves were examined for the starting ABPC antibody (with no substitutions) and each corresponding antibody variant at pH 5.4 and pH 7.4 to inform on two criteria: a) enhanced dissociation (e.g., higher koff values) at pH 5.4 due to histidine or alanine substitution compared to the starting ABPC (with no substitutions), and b) reduced dissociation at pH 7.4 (e.g., lower koff values) compared to pH 5.4 in the antibody variant itself and with the starting ABPC (with no substitutions). Heavy chain combinations variants that showed either enhanced dissociation at pH 5.4 or reduced dissociation at pH 7.4 or both (as compared to the starting ABPC), as shown in FIG. 38 were selected for further analysis (e.g, MYT4346-MYT4366, MYT4368, MYT4369, and MYT4370).

### Example 22. Construction and Screening of pH-Engineered DLL3 ABPCs

[0981] Multiple DLL3-binding monoclonal antibodies have been described in the literature and can be used as a template for engineering pH-dependent binding (Saunders L R (2016) “A DLL3-targeted antibody-drug conjugate eradicates high-grade pulmonary neuroendocrine tumor-initiating cells in vivo” Science Translational Medicine 7(302):302ra136). hSC16.13 (U.S. Pat. No. 9,089,617 B2) (Heavy chain SEQ ID NO: 236, Light chain SEQ ID NO: 237) were selected as a DLL3-binding monoclonal antibody for pH engineering via histidine scanning. Briefly, CDRs in the light chain were identified using the methods described by Kabat et al (Kabat et al. (1992) Sequences of Proteins of Immunological Interest, DIANE publishing) and IMGT (Lefranc M P (1999) “The IMGT unique numbering for Immunoglobulins, T cell receptors and Ig-like domains” The Immunologist 7, 132-136), and for each CDR, residues falling under either or both Kabat and IMGT CDR definitions were called as CDR residues. To generate pH-dependent sequence variants, individual amino acid mutations within the light chain CDRs that had been previously selected for further analysis in Example 20 were systematically combined two or more at a time (MYT4372). In cases where the starting CDR residue was a histidine, it was mutated to an alanine. Antibody variants with two or more histidine or alanine mutations in the light chain CDRs were generated by co-transfection of Expi293 cells with a) one light chain combinations sequence variant, and b) the corresponding starting ABPC heavy chain using methods known to the art. After allowing for four days of protein expression, cell culture supernatants were collected, quantified by SDS-PAGE analysis (FIG. 39), and the pH dependence of the variant was evaluated using biolayer interferometry (BLI) on an Octet RED 96e instrument. Briefly, cell culture supernatants were diluted based on qualitative expression level of the variant determined by visual examination of SDS-PAGE gels, 5 μL of cell culture supernatant was diluted into 195 μL of 1×PBST, pH 7.4 for high expressors, 25 μL of cell culture supernatant was diluted into 175 μL of 1×PBST, pH 7.4 for medium expressors and 100 μL of cell culture supernatant was diluted into 100 μL of 1×PBST, pH 7.4 for low expressors for loading onto the sensor tips. Diluted supernatants were then captured on an anti-human Fc sensor (Forte Bio). A baseline was established using 1×PBST (50 mM Potassium Phosphate Buffer+150 mM NaCl+0.05% Tween 20), pH 7.4, and the sensor was associated with 50 nM of DLL3 (R&D Systems, Cat #9749-DL, Lot No. DFSG0719011) in 1×PBST, pH 7.4, for 120 sec to generate an association curve. In the dissociation phase, the antibody-antigen complex on the sensor was exposed to 1×PBST, pH 7.4, for 300-600 sec. Baseline, association, and dissociation were repeated using 1×PBST, pH 5.4, throughout in a separate condition. Association and dissociation phase curves were examined for the starting ABPC antibody (with no substitutions) and each corresponding antibody variant at pH 5.4 and pH 7.4 to inform on two criteria: a) enhanced dissociation (e.g., higher koff values) at pH 5.4 due to histidine or alanine substitution compared to the starting ABPC (with no substitutions), and b) reduced dissociation at pH 7.4 (e.g., lower koff values) compared to pH 5.4 in the antibody variant itself and with the starting ABPC (with no substitutions). Light chain combinations variants that showed either enhanced dissociation at pH 5.4 or reduced dissociation at pH 7.4 or both (as compared to the starting ABPC), as shown in FIG. 40, were selected for further analysis (MYT4372).

### Example 23. Construction and Screening of pH-Engineered DLL3 ABPCs

[0982] Multiple DLL3-binding monoclonal antibodies have been described in the literature and can be used as a template for engineering pH-dependent binding (Saunders L R (2016) “A DLL3-targeted antibody-drug conjugate eradicates high-grade pulmonary neuroendocrine tumor-initiating cells in vivo” Science Translational Medicine 7(302):302ra136). hSC16.13 (U.S. Pat. No. 9,089,617 B2) (Heavy chain SEQ ID NO: 236, Light chain SEQ ID NO: 237) was selected as a DLL3-binding monoclonal antibody for pH engineering via histidine scanning. Briefly, CDRs in the heavy and light chains were identified using the methods described by Kabat et al (Kabat et al. (1992) Sequences of Proteins of Immunological Interest, DIANE publishing) and IMGT (Lefranc M P (1999) “The IMGT unique numbering for Immunoglobulins, T cell receptors and Ig-like domains” The Immunologist 7, 132-136), and for each CDR, residues falling under either or both Kabat and IMGT CDR definitions were called as CDR residues. To generate pH-dependent sequence variants, individual amino acid mutations within the heavy and light chain CDRs that had been previously selected for further analysis in Examples 19-22 were systematically combined two or more at a time (MYT3526-3551). In cases where the starting CDR residue was a histidine, it was mutated to an alanine. Antibody variants with two or more histidine or alanine mutations were generated by co-transfection of Expi293 cells with a) one light chain sequence variant, and b) one heavy chain sequence variant using methods known to the art. After allowing for four days of protein expression, cell culture supernatants were collected, quantified by SDS-PAGE analysis (FIG. 41), and the pH dependence of the variant was evaluated using biolayer interferometry (BLI) on an Octet RED 96e instrument. Briefly, cell culture supernatants were diluted based on qualitative expression level of the variant determined by visual examination of SDS-PAGE gels, 5 μL of cell culture supernatant was diluted into 195 μL of 1×PBST, pH 7.4 for high expressors, 25 μL of cell culture supernatant was diluted into 175 μL of 1×PBST, pH 7.4 for medium expressors and 100 μL of cell culture supernatant was diluted into 100 μL of 1×PBST, pH 7.4 for low expressors for loading onto the sensor tips. Diluted supernatants were then captured on an anti-human Fc sensor (Forte Bio). A baseline was established using 1×PBST (50 mM Potassium Phosphate Buffer+150 mM NaCl+0.05% Tween 20), pH 7.4, and the sensor was associated with 50 nM of DLL3 (R&D Systems, Cat #9749-DL, Lot No. DFSG0719011) in 1×PBST, pH 7.4, for 120 sec to generate an association curve. In the dissociation phase, the antibody-antigen complex on the sensor was exposed to 1×PBST, pH 7.4, for 300-600 sec. Baseline, association, and dissociation were repeated using 1×PBST, pH 5.4, throughout in a separate condition. Association and dissociation phase curves were examined for the starting ABPC antibody (with no substitutions) and each corresponding antibody variant at pH 5.4 and pH 7.4 to inform on two criteria: a) enhanced dissociation (e.g., higher koff values) at pH 5.4 due to histidine or alanine substitution compared to the starting ABPC (with no substitutions), and b) reduced dissociation at pH 7.4 (e.g., lower koff values) compared to pH 5.4 in the antibody variant itself and with the starting ABPC (with no substitutions). Paired heavy and light chain variants that showed either enhanced dissociation at pH 5.4 or reduced dissociation at pH 7.4 or both (as compared to the starting ABPC), as shown in FIG. 42, were selected for further analysis (MYT3526-MYT3530, MYT3532, MYT3534, MYT3536-MYT3537, MYT3539-MYT3543, MYT3545, MYT3547, and MYT3549-3551).

### Example 24. Construction and Screening of pH-Engineered DLL3 ABPCs

[0983] Multiple DLL3-binding monoclonal antibodies have been described in the literature and can be used as a template for engineering pH-dependent binding (Saunders L R (2016) “A DLL3-targeted antibody-drug conjugate eradicates high-grade pulmonary neuroendocrine tumor-initiating cells in vivo” Science Translational Medicine 7(302):302ra136). hSC16.15 (U.S. Pat. No. 9,089,617 B2) (Heavy chain SEQ ID NO: 335, Light chain SEQ ID NO: 336) was selected as a DLL3-binding monoclonal antibody for pH engineering via histidine scanning. Briefly, CDRs in the heavy chain were identified using the methods described by Kabat et al (Kabat et al. (1992) Sequences of Proteins of Immunological Interest, DIANE publishing) and IMGT (Lefranc M P (1999) “The IMGT unique numbering for Immunoglobulins, T cell receptors and Ig-like domains” The Immunologist 7, 132-136), and for each CDR, residues falling under either or both Kabat and IMGT CDR definitions were called as CDR residues. To generate pH-dependent sequence variants, individual amino acid residues within the heavy chain CDRs were systematically substituted with a histidine, one at a time (MYT3893-3932). In cases where the starting CDR residue was a histidine, it was mutated to an alanine. Antibody variants with only one histidine or alanine mutation in a heavy chain CDR were generated by co-transfection of Expi293 cells with a) one heavy chain sequence variant, and b) the corresponding starting ABPC light chain using methods known to the art. After allowing for four days of protein expression, cell culture supernatants were collected, quantified by SDS-PAGE (FIG. 43) analysis, and the pH dependence of the variant was evaluated using biolayer interferometry (BLI) on an Octet RED 96e instrument. Briefly, cell culture supernatants were diluted based on qualitative expression level of the variant determined by visual examination of SDS-PAGE gels, 5 μL of cell culture supernatant was diluted into 195 μL of 1×PBST, pH 7.4 for high expressors, 25 μL of cell culture supernatant was diluted into 175 μL of 1×PBST, pH 7.4 for medium expressors and 100 μL of cell culture supernatant was diluted into 100 μL of 1×PBST, pH 7.4 for low expressors for loading onto the sensor tips. Diluted supernatants were then captured on an anti-human Fc sensor (Forte Bio). A baseline was established using 1×PBST (50 mM Potassium Phosphate Buffer+150 mM NaCl+0.05% Tween 20), pH 7.4, and the sensor was associated with 50 nM of DLL3 (R&D Systems, Cat #9749-DL) in 1×PBST, pH 7.4, for 120 sec to generate an association curve. In the dissociation phase, the antibody-antigen complex on the sensor was exposed to 1×PBST, pH 7.4, for 300-600 sec. Baseline, association, and dissociation were repeated using 1×PBST, pH 5.4, throughout in a separate condition. Association and dissociation phase curves were examined for the starting ABPC antibody (with no substitutions) and each corresponding antibody variant at pH 5.4 and pH 7.4 to inform on two criteria: a) enhanced dissociation (e.g., higher koff values) at pH 5.4 due to histidine or alanine substitution compared to the starting ABPC (with no substitutions), and b) reduced dissociation at pH 7.4 (e.g., lower koff values) compared to pH 5.4 in the antibody variant itself and with the starting ABPC (with no substitutions). Heavy chain variants that showed either enhanced dissociation at pH 5.4 or reduced dissociation at pH 7.4 or both (as compared to the starting ABPC), as shown in FIG. 44 were selected for further analysis (MYT3897, MYT3902-MYT3906, MYT3924, and MYT3927-MYT3931). It was also noted that while some histidine and alanine mutations obliterated DLL3 binding (e.g., MYT3909, MYT3923, MYT3925, and MYT3926), others were tolerated with little (e.g., less than 1-fold change in dissociation constant KD or dissociation rate) or no change in DLL3 binding kinetics (e.g., MYT3893, MYT3894, MYT3895, MYT3896, MYT3898, MYT3899, MYT3900, MYT3901, MYT3907, MYT3908, MYT3910, MYT3911, MYT3912, MYT3913, MYT3914, MYT3915, MYT3916, MYT3917, MYT3918, MYT3919, MYT3920, MYT3921, MYT3922, and MYT3932). Especially because histidine is a large, positively charged amino acid, these variants with no change were noted as positions in the light chain that may tolerate a wide range of mutations and lead to antibodies with different sequence but similar binding properties, a designation that is not otherwise apparent.

### Example 25. Construction and Screening of pH-Engineered DLL3 ABPCs

[0984] Multiple DLL3-binding monoclonal antibodies have been described in the literature and can be used as a template for engineering pH-dependent binding (Saunders L R (2016) “A DLL3-targeted antibody-drug conjugate eradicates high-grade pulmonary neuroendocrine tumor-initiating cells in vivo” Science Translational Medicine 7(302):302ra136). hSC16.15 (U.S. Pat. No. 9,089,617 B2) (Heavy chain SEQ ID NO: 335, Light chain SEQ ID NO: 336) was selected as a DLL3-binding monoclonal antibody for pH engineering via histidine scanning. Briefly, CDRs in the light chain were identified using the methods described by Kabat et al (Kabat et al. (1992) Sequences of Proteins of Immunological Interest, DIANE publishing) and IMGT (Lefranc M P (1999) “The IMGT unique numbering for Immunoglobulins, T cell receptors and Ig-like domains” The Immunologist 7, 132-136), and for each CDR, residues falling under either or both Kabat and IMGT CDR definitions were called as CDR residues. To generate pH-dependent sequence variants, individual amino acid residues within the light chain CDRs were systematically substituted with a histidine, one at a time (MYT3933-MYT3956). In cases where the starting CDR residue was a histidine, it was mutated to an alanine. Antibody variants with only one histidine or alanine mutation in a light chain CDR were generated by co-transfection of Expi293 cells with a) one light chain sequence variant, and b) the corresponding starting ABPC heavy chain using methods known to the art. After allowing for four days of protein expression, cell culture supernatants were collected, quantified by SDS-PAGE analysis (FIG. 45), and the pH dependence of the variant was evaluated using biolayer interferometry (BLI) on an Octet RED 96e instrument. Briefly, cell culture supernatants were diluted based on qualitative expression level of the variant determined by visual examination of SDS-PAGE gels, 5 μL of cell culture supernatant was diluted into 195 μL of 1×PBST, pH 7.4 for high expressors, 25 μL of cell culture supernatant was diluted into 175 μL of 1×PBST, pH 7.4 for medium expressors and 100 μL of cell culture supernatant was diluted into 100 μL of 1×PBST, pH 7.4 for low expressors for loading onto the sensor tips. Diluted supernatants were then captured on an anti-human Fc sensor (Forte Bio). A baseline was established using 1×PBST (50 mM Potassium Phosphate Buffer+150 mM NaCl+0.05% Tween 20), pH 7.4, and the sensor was associated with 50 nM of DLL3 (R&D Systems, Cat #9749-DL, Lot No. DFSG0719011) in 1×PBST, pH 7.4, for 120 sec to generate an association curve. In the dissociation phase, the antibody-antigen complex on the sensor was exposed to 1×PBST, pH 7.4, for 300-600 sec. Baseline, association, and dissociation were repeated using 1×PBST, pH 5.4, throughout in a separate condition. Association and dissociation phase curves were examined for the starting ABPC antibody (with no substitutions) and each corresponding antibody variant at pH 5.4 and pH 7.4 to inform on two criteria: a) enhanced dissociation (e.g., higher koff values) at pH 5.4 due to histidine or alanine substitution compared to the starting ABPC (with no substitutions), and b) reduced dissociation at pH 7.4 (e.g., lower koff values) compared to pH 5.4 in the antibody variant itself and with the starting ABPC (with no substitutions). Light chain variants that showed either enhanced dissociation at pH 5.4 or reduced dissociation at pH 7.4 or both (as compared to the starting ABPC), as shown in FIG. 46 were selected for further analysis (e.g., MYT3933, MYT3935, MYT3938, MYT3940, MYT3943, MYT3944, MYT3948-MYT3953, and MYT3955). It was also noted that while no histidine or alanine mutations obliterated DLL3 binding, others were tolerated with little (e.g., less than 1-fold change in dissociation constant KD or dissociation rate) or no change in DLL3 binding kinetics (e.g., MYT3934, MYT3936, MYT3937, MYT3939, MYT3941, MYT3942, MYT3945, MYT3946, MYT3947, MYT3954, and MYT3956). Especially because histidine is a large, positively charged amino acid, these variants with no change were noted as positions in the light chain that may tolerate a wide range of mutations and lead to antibodies with different sequence but similar binding properties, a designation that is not otherwise apparent.

### Example 26. Construction and Screening of pH-Engineered DLL3 ABPCs

[0985] Multiple DLL3-binding monoclonal antibodies have been described in the literature and can be used as a template for engineering pH-dependent binding (Saunders L R (2016) “A DLL3-targeted antibody-drug conjugate eradicates high-grade pulmonary neuroendocrine tumor-initiating cells in vivo” Science Translational Medicine 7(302):302ra136). hSC16.25 (U.S. Pat. No. 9,089,617 B2)(Heavy chain SEQ ID NO: 401, Light chain SEQ ID NO: 402) was selected as a DLL3-binding monoclonal antibody for pH engineering via histidine scanning. Briefly, CDRs in the heavy chain were identified using the methods described by Kabat et al (Kabat et al. (1992) Sequences of Proteins of Immunological Interest, DIANE publishing) and IMGT (Lefranc M P (1999) “The IMGT unique numbering for Immunoglobulins, T cell receptors and Ig-like domains” The Immunologist 7, 132-136), and for each CDR, residues falling under either or both Kabat and IMGT CDR definitions were called as CDR residues. To generate pH-dependent sequence variants, individual amino acid residues within the heavy chain CDRs were systematically substituted with a histidine, one at a time (MYT3759-3802). In cases where the starting CDR residue was a histidine, it was mutated to an alanine. Antibody variants with only one histidine or alanine mutation in a heavy chain CDR were generated by co-transfection of Expi293 cells with a) one heavy chain sequence variant, and b) the corresponding starting ABPC light chain using methods known to the art. After allowing for four days of protein expression, cell culture supernatants were collected, quantified by SDS-PAGE (FIG. 47) analysis, and the pH dependence of the variant was evaluated using biolayer interferometry (BLI) on an Octet RED 96e instrument. Briefly, cell culture supernatants were diluted based on qualitative expression level of the variant determined by visual examination of SDS-PAGE gels, 5 μL of cell culture supernatant was diluted into 195 μL of 1×PBST, pH 7.4 for high expressors, 25 μL of cell culture supernatant was diluted into 175 μL of 1×PBST, pH 7.4 for medium expressors and 100 μL of cell culture supernatant was diluted into 100 μL of 1×PBST, pH 7.4 for low expressors for loading onto the sensor tips. Diluted supernatants were then captured on an anti-human Fc sensor (Forte Bio). A baseline was established using 1×PBST (50 mM Potassium Phosphate Buffer+150 mM NaCl+0.05% Tween 20), pH 7.4, and the sensor was associated with 50 nM of DLL3 (R&D Systems, Cat #9749-DL) in 1×PBST, pH 7.4, for 120 sec to generate an association curve. In the dissociation phase, the antibody-antigen complex on the sensor was exposed to 1×PBST, pH 7.4, for 300-600 sec. Baseline, association, and dissociation were repeated using 1×PBST, pH 5.4, throughout in a separate condition. Association and dissociation phase curves were examined for the starting ABPC antibody (with no substitutions) and each corresponding antibody variant at pH 5.4 and pH 7.4 to inform on two criteria: a) enhanced dissociation (e.g., higher koff values) at pH 5.4 due to histidine or alanine substitution compared to the starting ABPC (with no substitutions), and b) reduced dissociation at pH 7.4 (e.g., lower koff values) compared to pH 5.4 in the antibody variant itself and with the starting ABPC (with no substitutions). Heavy chain variants that showed either enhanced dissociation at pH 5.4 or reduced dissociation at pH 7.4 or both (as compared to the starting ABPC), as shown in FIG. 48, were selected for further analysis (MYT3760, MYT3790, MYT3792, MYT3793, MYT3797, and MYT3798). It was also noted that while some histidine and alanine mutations obliterated DLL3 binding (e.g., MYT3789, MYT3795, MYT3799, and MYT3800), others were tolerated with little (e.g., less than 1-fold change in dissociation constant KD or dissociation rate) or no change in DLL3 binding kinetics (e.g., MYT3759, MYT3761, MYT3762, MYT3763, MYT3764, MYT3765, MYT3766, MYT3767, MYT3772-3788, MYT3791, MYT3794, MYT3801, and MYT3802). Especially because histidine is a large, positively charged amino acid, these variants with no change were noted as positions in the light chain that may tolerate a wide range of mutations and lead to antibodies with different sequence but similar binding properties, a designation that is not otherwise apparent.

### Example 27. Construction and Screening of pH-Engineered DLL3 ABPCs

[0986] Multiple DLL3-binding monoclonal antibodies have been described in the literature and can be used as a template for engineering pH-dependent binding (Saunders L R (2016) “A DLL3-targeted antibody-drug conjugate eradicates high-grade pulmonary neuroendocrine tumor-initiating cells in vivo” Science Translational Medicine 7(302):302ra136). hSC16.25 (U.S. Pat. No. 9,089,617 B2) (Heavy chain SEQ ID NO: 401, Light chain SEQ ID NO: 402) was selected as a DLL3-binding monoclonal antibody for pH engineering via histidine scanning. Briefly, CDRs in the light chain were identified using the methods described by Kabat et al (Kabat et al. (1992) Sequences of Proteins of Immunological Interest, DIANE publishing) and IMGT (Lefranc M P (1999) “The IMGT unique numbering for Immunoglobulins, T cell receptors and Ig-like domains” The Immunologist 7, 132-136), and for each CDR, residues falling under either or both Kabat and IMGT CDR definitions were called as CDR residues. To generate pH-dependent sequence variants, individual amino acid residues within the light chain CDRs were systematically substituted with a histidine, one at a time (MYT3803-MYT3825). In cases where the starting CDR residue was a histidine, it was mutated to an alanine. Antibody variants with only one histidine or alanine mutation in a light chain CDR were generated by co-transfection of Expi293 cells with a) one light chain sequence variant, and b) the corresponding starting ABPC heavy chain using methods known to the art. After allowing for four days of protein expression, cell culture supernatants were collected, quantified by SDS-PAGE analysis (FIG. 49), and the pH dependence of the variant was evaluated using biolayer interferometry (BLI) on an Octet RED 96e instrument. Briefly, cell culture supernatants were diluted based on qualitative expression level of the variant determined by visual examination of SDS-PAGE gels, 5 μL of cell culture supernatant was diluted into 195 μL of 1×PBST, pH 7.4 for high expressors, 25 μL of cell culture supernatant was diluted into 175 μL of 1×PBST, pH 7.4 for medium expressors and 100 μL of cell culture supernatant was diluted into 100 μL of 1×PBST, pH 7.4 for low expressors for loading onto the sensor tips. Diluted supernatants were then captured on an anti-human Fc sensor (Forte Bio). A baseline was established using 1×PBST (50 mM Potassium Phosphate Buffer+150 mM NaCl+0.05% Tween 20), pH 7.4, and the sensor was associated with 50 nM of DLL3 (R&D Systems, Cat #9749-DL, Lot No. DFSG0719011) in 1×PBST, pH 7.4, for 120 sec to generate an association curve. In the dissociation phase, the antibody-antigen complex on the sensor was exposed to 1×PBST, pH 7.4, for 300-600 sec. Baseline, association, and dissociation were repeated using 1×PBST, pH 5.4, throughout in a separate condition. Association and dissociation phase curves were examined for the starting ABPC antibody (with no substitutions) and each corresponding antibody variant at pH 5.4 and pH 7.4 to inform on two criteria: a) enhanced dissociation (e.g., higher koff values) at pH 5.4 due to histidine or alanine substitution compared to the starting ABPC (with no substitutions), and b) reduced dissociation at pH 7.4 (e.g., lower koff values) compared to pH 5.4 in the antibody variant itself and with the starting ABPC (with no substitutions). Light chain variants that showed either enhanced dissociation at pH 5.4 or reduced dissociation at pH 7.4 or both (as compared to the starting ABPC), as shown in FIG. 50, were selected for further analysis (e.g., MYT3806 and MYT3807). It was also noted that while some histidine and alanine mutations obliterated DLL3 binding (e.g., MYT3810, MYT3811, and MYT3817), others were tolerated with little (e.g., less than 1-fold change in dissociation constant KD or dissociation rate) or no change in DLL3 binding kinetics (e.g., MYT3803, MYT3804, MYT3812, MYT3813, MYT3814, MYT3815, MYT3816, MYT3818, MYT3820, MYT3821, and MYT3822). Especially because histidine is a large, positively charged amino acid, these variants with no change were noted as positions in the light chain that may tolerate a wide range of mutations and lead to antibodies with different sequence but similar binding properties, a designation that is not otherwise apparent.

### Example 28. Construction and Screening of pH-Engineered DLL3 ABPCs

[0987] Multiple DLL3-binding monoclonal antibodies have been described in the literature and can be used as a template for engineering pH-dependent binding (Saunders L R (2016) “A DLL3-targeted antibody-drug conjugate eradicates high-grade pulmonary neuroendocrine tumor-initiating cells in vivo” Science Translational Medicine 7(302):302ra136). hSC16.34 (U.S. Pat. No. 9,089,617 B2) (Heavy chain SEQ ID NO: 470, Light chain SEQ ID NO: 471) was selected as a DLL3-binding monoclonal antibody for pH engineering via histidine scanning. Briefly, CDRs in the heavy chain were identified using the methods described by Kabat et al (Kabat et al. (1992) Sequences of Proteins of Immunological Interest, DIANE publishing) and IMGT (Lefranc M P (1999) “The IMGT unique numbering for Immunoglobulins, T cell receptors and Ig-like domains” The Immunologist 7, 132-136), and for each CDR, residues falling under either or both Kabat and IMGT CDR definitions were called as CDR residues. To generate pH-dependent sequence variants, individual amino acid residues within the heavy chain CDRs were systematically substituted with a histidine, one at a time (MYT3827-MYT3867). In cases where the starting CDR residue was a histidine, it was mutated to an alanine. Antibody variants with only one histidine or alanine mutation in a heavy chain CDR were generated by co-transfection of Expi293 cells with a) one heavy chain sequence variant, and b) the corresponding starting ABPC light chain using methods known to the art. After allowing for four days of protein expression, cell culture supernatants were collected, quantified by SDS-PAGE (FIG. 51) analysis, and the pH dependence of the variant was evaluated using biolayer interferometry (BLI) on an Octet RED 96e instrument. Briefly, cell culture supernatants were diluted based on qualitative expression level of the variant determined by visual examination of SDS-PAGE gels, 5 μL of cell culture supernatant was diluted into 195 μL of 1×PBST, pH 7.4 for high expressors, 25 μL of cell culture supernatant was diluted into 175 μL of 1×PBST, pH 7.4 for medium expressors and 100 μL of cell culture supernatant was diluted into 100 μL of 1×PBST, pH 7.4 for low expressors for loading onto the sensor tips. Diluted supernatants were then captured on an anti-human Fc sensor (Forte Bio). A baseline was established using 1×PBST (50 mM Potassium Phosphate Buffer+150 mM NaCl+0.05% Tween 20), pH 7.4, and the sensor was associated with 50 nM of DLL3 (R&D Systems, Cat #9749-DL) in 1×PBST, pH 7.4, for 120 sec to generate an association curve. In the dissociation phase, the antibody-antigen complex on the sensor was exposed to 1×PBST, pH 7.4, for 300-600 sec. Baseline, association, and dissociation were repeated using 1×PBST, pH 5.4, throughout in a separate condition. Association and dissociation phase curves were examined for the starting ABPC antibody (with no substitutions) and each corresponding antibody variant at pH 5.4 and pH 7.4 to inform on two criteria: a) enhanced dissociation (e.g., higher koff values) at pH 5.4 due to histidine or alanine substitution compared to the starting ABPC (with no substitutions), and b) reduced dissociation at pH 7.4 (e.g., lower koff values) compared to pH 5.4 in the antibody variant itself and with the starting ABPC (with no substitutions). Heavy chain variants that showed either enhanced dissociation at pH 5.4 or reduced dissociation at pH 7.4 or both (as compared to the starting ABPC), as shown in FIG. 52, were selected for further analysis (MYT3828, MYT3831, MYT3833, MYT3836, MYT3838, MYT3839, MYT3840, MYT3841, MYT3843, MYT3844, MYT3846, MYT3848, MYT3849, MYT3850, MYT3853, MYT3858, MYT3861, MYT3863, MYT3865, MYT3866, and MYT3867). It was also noted that while some histidine and alanine mutations obliterated DLL3 binding (e.g., MYT3837, MYT3842, MYT3857, MYT3859, MYT3860, and MYT3864), others were tolerated with little (e.g., less than 1-fold change in dissociation constant KD or dissociation rate) or no change in DLL3 binding kinetics (e.g., MYT3827, MYT3829, MYT3830, MYT3832, MYT3834, MYT3835, MYT3845, MYT3847, MYT3851, MYT3852, MYT3854, MYT3855, MYT3856, MYT3862). Especially because histidine is a large, positively charged amino acid, these variants with no change were noted as positions in the light chain that may tolerate a wide range of mutations and lead to antibodies with different sequence but similar binding properties, a designation that is not otherwise apparent.

### Example 29. Construction and Screening of pH-Engineered DLL3 ABPCs

[0988] Multiple DLL3-binding monoclonal antibodies have been described in the literature and can be used as a template for engineering pH-dependent binding (Saunders L R (2016) “A DLL3-targeted antibody-drug conjugate eradicates high-grade pulmonary neuroendocrine tumor-initiating cells in vivo” Science Translational Medicine 7(302):302ra136). hSC16.34 (U.S. Pat. No. 9,089,617 B2) (Heavy chain SEQ ID NO: 470, Light chain SEQ ID NO: 471) was selected as a DLL3-binding monoclonal antibody for pH engineering via histidine scanning. Briefly, CDRs in the light chain were identified using the methods described by Kabat et al (Kabat et al. (1992) Sequences of Proteins of Immunological Interest, DIANE publishing) and IMGT (Lefranc M P (1999) “The IMGT unique numbering for Immunoglobulins, T cell receptors and Ig-like domains” The Immunologist 7, 132-136), and for each CDR, residues falling under either or both Kabat and IMGT CDR definitions were called as CDR residues. To generate pH-dependent sequence variants, individual amino acid residues within the light chain CDRs were systematically substituted with a histidine, one at a time (MYT3868-MYT3891). In cases where the starting CDR residue was a histidine, it was mutated to an alanine. Antibody variants with only one histidine or alanine mutation in a light chain CDR were generated by co-transfection of Expi293 cells with a) one light chain sequence variant, and b) the corresponding starting ABPC heavy chain using methods known to the art. After allowing for four days of protein expression, cell culture supernatants were collected, quantified by SDS-PAGE analysis (FIG. 53), and the pH dependence of the variant was evaluated using biolayer interferometry (BLI) on an Octet RED 96e instrument. Briefly, cell culture supernatants were diluted based on qualitative expression level of the variant determined by visual examination of SDS-PAGE gels, 5 μL of cell culture supernatant was diluted into 195 μL of 1×PBST, pH 7.4 for high expressors, 25 μL of cell culture supernatant was diluted into 175 μL of 1×PBST, pH 7.4 for medium expressors and 100 μL of cell culture supernatant was diluted into 100 μL of 1×PBST, pH 7.4 for low expressors for loading onto the sensor tips. Diluted supernatants were then captured on an anti-human Fc sensor (Forte Bio). A baseline was established using 1×PBST (50 mM Potassium Phosphate Buffer+150 mM NaCl+0.05% Tween 20), pH 7.4, and the sensor was associated with 50 nM of DLL3 (R&D Systems, Cat #9749-DL, Lot No. DFSG0719011) in 1×PBST, pH 7.4, for 120 sec to generate an association curve. In the dissociation phase, the antibody-antigen complex on the sensor was exposed to 1×PBST, pH 7.4, for 300-600 sec. Baseline, association, and dissociation were repeated using 1×PBST, pH 5.4, throughout in a separate condition. Association and dissociation phase curves were examined for the starting ABPC antibody (with no substitutions) and each corresponding antibody variant at pH 5.4 and pH 7.4 to inform on two criteria: a) enhanced dissociation (e.g., higher koff values) at pH 5.4 due to histidine or alanine substitution compared to the starting ABPC (with no substitutions), and b) reduced dissociation at pH 7.4 (e.g., lower koff values) compared to pH 5.4 in the antibody variant itself and with the starting ABPC (with no substitutions). Light chain variants that showed either enhanced dissociation at pH 5.4 or reduced dissociation at pH 7.4 or both (as compared to the starting ABPC), as shown in FIG. 54, were selected for further analysis (e.g., MYT3870, MYT3873-MYT3877, MYT3879, MYT3881, MYT3883, MYT3886, MYT3888, MYT3890, and MYT3891). It was also noted that while some histidine and alanine mutations obliterated DLL3 binding (e.g., MYT3885), others were tolerated with little (e.g., less than 1-fold change in dissociation constant KD or dissociation rate) or no change in DLL3 binding kinetics (e.g., MYT3868, MYT3869, MYT3871, MYT3872, MYT3878, MYT3880, MYT3882, MYT3884, MYT3887, and MYT3889). Especially because histidine is a large, positively charged amino acid, these variants with no change were noted as positions in the light chain that may tolerate a wide range of mutations and lead to antibodies with different sequence but similar binding properties, a designation that is not otherwise apparent.

### Example 30. Construction and Screening of pH-Engineered DLL3 ABPCs

[0989] Multiple DLL3-binding monoclonal antibodies have been described in the literature and can be used as a template for engineering pH-dependent binding (Saunders L R (2016) “A DLL3-targeted antibody-drug conjugate eradicates high-grade pulmonary neuroendocrine tumor-initiating cells in vivo” Science Translational Medicine 7(302):302ra136). SC16.67 (U.S. Pat. No. 9,089,617 B2) (Heavy chain SEQ ID NO: 537, Light chain SEQ ID NO: 538) was selected as a DLL3-binding monoclonal antibody for pH engineering via histidine scanning. Briefly, CDRs in the heavy chain were identified using the methods described by Kabat et al (Kabat et al. (1992) Sequences of Proteins of Immunological Interest, DIANE publishing) and IMGT (Lefranc M P (1999) “The IMGT unique numbering for Immunoglobulins, T cell receptors and Ig-like domains” The Immunologist 7, 132-136), and for each CDR, residues falling under either or both Kabat and IMGT CDR definitions were called as CDR residues. To generate pH-dependent sequence variants, individual amino acid residues within the heavy chain CDRs were systematically substituted with a histidine, one at a time (MYT3112-MYT3148). In cases where the starting CDR residue was a histidine, it was mutated to an alanine. Antibody variants with only one histidine or alanine mutation in a heavy chain CDR were generated by co-transfection of Expi293 cells with a) one heavy chain sequence variant, and b) the corresponding starting ABPC light chain using methods known to the art. After allowing for four days of protein expression, cell culture supernatants were collected, quantified by SDS-PAGE (FIG. 55) analysis, and the pH dependence of the variant was evaluated using biolayer interferometry (BLI) on an Octet RED 96e instrument. Briefly, cell culture supernatants were diluted based on qualitative expression level of the variant determined by visual examination of SDS-PAGE gels, 5 μL of cell culture supernatant was diluted into 195 μL of 1×PBST, pH 7.4 for high expressors, 25 μL of cell culture supernatant was diluted into 175 μL of 1×PBST, pH 7.4 for medium expressors and 100 μL of cell culture supernatant was diluted into 100 μL of 1×PBST, pH 7.4 for low expressors for loading onto the sensor tips. Diluted supernatants were then captured on an anti-human Fc sensor (Forte Bio). A baseline was established using 1×PBST (50 mM Potassium Phosphate Buffer+150 mM NaCl+0.05% Tween 20), pH 7.4, and the sensor was associated with 50 nM of DLL3 (R&D Systems, Cat #9749-DL) in 1×PBST, pH 7.4, for 120 sec to generate an association curve. In the dissociation phase, the antibody-antigen complex on the sensor was exposed to 1×PBST, pH 7.4, for 300-600 sec. Baseline, association, and dissociation were repeated using 1×PBST, pH 5.4, throughout in a separate condition. Association and dissociation phase curves were examined for the starting ABPC antibody (with no substitutions) and each corresponding antibody variant at pH 5.4 and pH 7.4 to inform on two criteria: a) enhanced dissociation (e.g., higher koff values) at pH 5.4 due to histidine or alanine substitution compared to the starting ABPC (with no substitutions), and b) reduced dissociation at pH 7.4 (e.g., lower koff values) compared to pH 5.4 in the antibody variant itself and with the starting ABPC (with no substitutions). Heavy chain variants that showed either enhanced dissociation at pH 5.4 or reduced dissociation at pH 7.4 or both (as compared to the starting ABPC), as shown in FIG. 56, were selected for further analysis (MYT3112, MYT3115, MYT3117, MYT3118, MYT3122, MYT3124, MYT3125, MYT3126, MYT3129, MYT3130, MYT3131, MYT3134, MYT3137, MYT3139, MYT3140, MYT3143, MYT3145, MYT3146, and MYT3148). It was also noted that while some histidine and alanine mutations obliterated DLL3 binding (e.g., MYT3119, and MYT3144), others were tolerated with little (e.g., less than 1-fold change in dissociation constant KD or dissociation rate) or no change in DLL3 binding kinetics (e.g., MYT3113, MYT3114, MYT3116, MYT3127, MYT3128, MYT3133, MYT3135, and MYT3136). Especially because histidine is a large, positively charged amino acid, these variants with no change were noted as positions in the light chain that may tolerate a wide range of mutations and lead to antibodies with different sequence but similar binding properties, a designation that is not otherwise apparent.

### Example 31. Construction and Screening of pH-Engineered DLL3 ABPCs

[0990] Multiple DLL3-binding monoclonal antibodies have been described in the literature and can be used as a template for engineering pH-dependent binding (Saunders L R (2016) “A DLL3-targeted antibody-drug conjugate eradicates high-grade pulmonary neuroendocrine tumor-initiating cells in vivo” Science Translational Medicine 7(302):302ra136). SC16.67 (U.S. Pat. No. 9,089,617 B2) (Heavy chain SEQ ID NO: 537, Light chain SEQ ID NO: 538) was selected as a DLL3-binding monoclonal antibody for pH engineering via histidine scanning. Briefly, CDRs in the light chain were identified using the methods described by Kabat et al (Kabat et al. (1992) Sequences of Proteins of Immunological Interest, DIANE publishing) and IMGT (Lefranc M P (1999) “The IMGT unique numbering for Immunoglobulins, T cell receptors and Ig-like domains” The Immunologist 7, 132-136), and for each CDR, residues falling under either or both Kabat and IMGT CDR definitions were called as CDR residues. To generate pH-dependent sequence variants, individual amino acid residues within the light chain CDRs were systematically substituted with a histidine, one at a time (MYT3149-MYT3178). In cases where the starting CDR residue was a histidine, it was mutated to an alanine. Antibody variants with only one histidine or alanine mutation in a light chain CDR were generated by co-transfection of Expi293 cells with a) one light chain sequence variant, and b) the corresponding starting ABPC heavy chain using methods known to the art. After allowing for four days of protein expression, cell culture supernatants were collected, quantified by SDS-PAGE analysis (FIG. 57), and the pH dependence of the variant was evaluated using biolayer interferometry (BLI) on an Octet RED 96e instrument. Briefly, cell culture supernatants were diluted based on qualitative expression level of the variant determined by visual examination of SDS-PAGE gels, 5 μL of cell culture supernatant was diluted into 195 μL of 1×PBST, pH 7.4 for high expressors, 25 μL of cell culture supernatant was diluted into 175 μL of 1×PBST, pH 7.4 for medium expressors and 100 μL of cell culture supernatant was diluted into 100 μL of 1×PBST, pH 7.4 for low expressors for loading onto the sensor tips. Diluted supernatants were then captured on an anti-human Fc sensor (Forte Bio). A baseline was established using 1×PBST (50 mM Potassium Phosphate Buffer+150 mM NaCl+0.05% Tween 20), pH 7.4, and the sensor was associated with 50 nM of DLL3 (R&D Systems, Cat #9749-DL, Lot No. DFSG0719011) in 1×PBST, pH 7.4, for 120 sec to generate an association curve. In the dissociation phase, the antibody-antigen complex on the sensor was exposed to 1×PBST, pH 7.4, for 300-600 sec. Baseline, association, and dissociation were repeated using 1×PBST, pH 5.4, throughout in a separate condition. Association and dissociation phase curves were examined for the starting ABPC antibody (with no substitutions) and each corresponding antibody variant at pH 5.4 and pH 7.4 to inform on two criteria: a) enhanced dissociation (e.g., higher koff values) at pH 5.4 due to histidine or alanine substitution compared to the starting ABPC (with no substitutions), and b) reduced dissociation at pH 7.4 (e.g., lower koff values) compared to pH 5.4 in the antibody variant itself and with the starting ABPC (with no substitutions). Light chain variants that showed either enhanced dissociation at pH 5.4 or reduced dissociation at pH 7.4 or both (as compared to the starting ABPC) as shown in FIG. 58 were selected for further analysis (e.g., MYT3150, MYT3151, MYT3153, MYT3154, MYT3160, MYT3161, MYT3163, MYT3164, MYT3167, MYT3172, MYT3173, and MYT3177). It was also noted that some histidine and alanine mutations were tolerated with little (e.g., less than 1-fold change in dissociation constant KD or dissociation rate) or no change in DLL3 binding kinetics (e.g., MYT3149, MYT3152, MYT3156, MYT3157, MYT3158, MYT3159, MYT3162, MYT3165, MYT3166, MYT3168, MYT3169, MYT3172, MYT3173, MYT3174, MYT3175, MYT3176, and MYT3178). Especially because histidine is a large, positively charged amino acid, these variants with no change were noted as positions in the light chain that may tolerate a wide range of mutations and lead to antibodies with different sequence but similar binding properties, a designation that is not otherwise apparent.

### Example 32. Construction and Screening of pH-Engineered DLL3 ABPCs

[0991] Multiple DLL3-binding monoclonal antibodies have been described in the literature and can be used as a template for engineering pH-dependent binding (Saunders L R (2016) “A DLL3-targeted antibody-drug conjugate eradicates high-grade pulmonary neuroendocrine tumor-initiating cells in vivo” Science Translational Medicine 7(302):302ra136). SC16.67 (U.S. Pat. No. 9,089,617 B2) (Heavy chain SEQ ID NO: 537, Light chain SEQ ID NO: 538) was selected as a DLL3-binding monoclonal antibody for pH engineering via histidine scanning. Briefly, CDRs in the heavy and light chains were identified using the methods described by Kabat et al (Kabat et al. (1992) Sequences of Proteins of Immunological Interest, DIANE publishing) and IMGT (Lefranc M P (1999) “The IMGT unique numbering for Immunoglobulins, T cell receptors and Ig-like domains” The Immunologist 7, 132-136), and for each CDR, residues falling under either or both Kabat and IMGT CDR definitions were called as CDR residues. To generate pH-dependent sequence variants, individual amino acid mutations within the heavy and light chain CDRs that had been previously selected for further analysis in Examples 30 and 31 were systematically combined two or more at a time (MYT3514-3525). In cases where the starting CDR residue was a histidine, it was mutated to an alanine. Antibody variants with two or more histidine or alanine mutations were generated by co-transfection of Expi293 cells with a) one light chain sequence variant, and b) one heavy chain sequence variant using methods known to the art. After allowing for four days of protein expression, cell culture supernatants were collected, quantified by SDS-PAGE analysis (FIG. 59), and the pH dependence of the variant was evaluated using biolayer interferometry (BLI) on an Octet RED 96e instrument. Briefly, cell culture supernatants were diluted based on qualitative expression level of the variant determined by visual examination of SDS-PAGE gels, 5 μL of cell culture supernatant was diluted into 195 μL of 1×PBST, pH 7.4 for high expressors, 25 μL of cell culture supernatant was diluted into 175 μL of 1×PBST, pH 7.4 for medium expressors and 100 μL of cell culture supernatant was diluted into 100 μL of 1×PBST, pH 7.4 for low expressors for loading onto the sensor tips. Diluted supernatants were then captured on an anti-human Fc sensor (Forte Bio). A baseline was established using 1×PBST (50 mM Potassium Phosphate Buffer+150 mM NaCl+0.05% Tween 20), pH 7.4, and the sensor was associated with 50 nM of DLL3 (R&D Systems, Cat #9749-DL, Lot No. DFSG0719011) in 1×PBST, pH 7.4, for 120 sec to generate an association curve. In the dissociation phase, the antibody-antigen complex on the sensor was exposed to 1×PBST, pH 7.4, for 300-600 sec. Baseline, association, and dissociation were repeated using 1×PBST, pH 5.4, throughout in a separate condition. Association and dissociation phase curves were examined for the starting ABPC antibody (with no substitutions) and each corresponding antibody variant at pH 5.4 and pH 7.4 to inform on two criteria: a) enhanced dissociation (e.g., higher koff values) at pH 5.4 due to histidine or alanine substitution compared to the starting ABPC (with no substitutions), and b) reduced dissociation at pH 7.4 (e.g., lower koff values) compared to pH 5.4 in the antibody variant itself and with the starting ABPC (with no substitutions). Paired heavy and light chain variants that showed either enhanced dissociation at pH 5.4 or reduced dissociation at pH 7.4 or both (as compared to the starting ABPC), as shown in FIG. 60, were selected for further analysis (MYT3514-3525).

### Example 33. Characterization of Cellular Internalization and Endolysosomal Delivery of pH Engineered Anti-DLL3 ABPCs

[0992] Selected anti-DLL3 pH engineered antibody variants from Examples 9-32 were analyzed for internalization and endolysosomal delivery in NCI-H82 (DLL3+) cells. NCI-H82 cells (ATCC; HTB-175) were collected and resuspended in RPMI-1640 medium (ATCC; 30-2001)+10% GenClone heat inactivated fetal bovine serum (HI FBS) (Genesee Scientific; 25-514H). Cell counts were determined using trypan blue staining and the Countess II FL Automated Cell Counter (Thermofisher; AMQAF1000). Cells were then diluted to 2,000,000 cells/mL and 50 μl/well was seeded into 96-well flat bottom cell culture plates (Genesee Scientific; 25-109). Anti-DLL3 pH engineered antibody variants, starting ABPC antibodies, control IgG1 isotype control (BP0297, Bioxcell), and vehicle control were diluted in native culture media to 100 nM and then mixed 1:1 with 300 nM Zenon pHrodo iFL Human IgG Labeling Reagent (ThermoFisher; Z25611). The mixture was incubated for 20 minutes at room temperature, followed by addition of 50 μL to cells. The mixture of cells, anti-DLL3 antibody variants, and Zenon pHrodo iFL Human IgG Labeling Reagent was incubated at 37° C., 5% C02 for 1-24 hours. Following incubation, 100 μL of ice cold Flow Cytometry (FC) buffer (phosphate buffered saline (PBS), pH 7.4+2 mM ethylenediaminetetraacetic acid (EDTA)+2% (v/v) HI FBS is added to each well. Cells were then spun down at 4° C. for 2 min at 2000 rpm, washed with 200 μL ice cold FC buffer and resuspended in 100 μL ice cold FC buffer. Mean green fluorescence intensity was detected using a BD Accuri C6 flow cytometer. Data was analyzed using Flowjo analysis software. pHrodo green is a pH sensitive dye that fluoresces in the low pH environment of the endosomes and lysosomes and therefore can be used to quantify antibody internalization and endolysosomal delivery. Internalization and endolysosomal delivery of anti-DLL3 starting ABPC antibodies rovalpituzumab, SC16.4, hSC16.13, hSC16.15, hSC16.25, hSC16.34, SC16.67 and their variants in NCI-H82 (DLL3+) cells is shown in FIG. 16 as measured by pHrodo green mean fluorescence intensity. Several pH engineered anti-DLL3 antibody variants showed increased mean fluorescence intensity relative to their corresponding starting ABPC antibodies demonstrating that increased dissociation at lower pH leads to enhanced internalization and endolysosomal delivery inside cells as shown by increased fluorescence or increased fluorescence as compared to IgG1 isotype control. Increased endolysosomal delivery is quantitated for each pH engineered anti-DLL3 antibody variant on the top of each bar as a ratio of: the variant's mean fluorescence intensity minus the mean fluorescence intensity of the IgG control, then all divided by the variant's corresponding starting ABPC's mean fluorescence intensity minus the mean fluorescence intensity of the IgG control. For example MYT1182, MYT1183, MYT1193, MYT2808, MYT2829 etc., antibody variants of rovalpituzumab, show increased internalization and endolysosomal delivery relative to rovalpituzumab (MYT0638); similarly for example MYT3078, MYT3410, MYT3413, MYT3419, MYT4176, MYT4184 etc., antibody variants of SC16.4, show increased internalization and endolysosomal delivery relative to SC16.4 (MYT3047) etc. Such pH engineered anti-DLL3 antibody variants with increased mean fluorescence intensity relative to their starting ABPC antibodies were selected for further analysis (MYT1182, MYT1183, MYT1185, MYT1193, MYT1194, MYT1195, MYT1196, MYT2808, MYT2815, MYT2819, MYT2820, MYT2828, MYT2829, MYT2830, MYT2834, MYT2835, MYT4264, MYT4267, MYT4268, MYT4278, MYT4279, MYT3078, MYT3406, MYT3410, MYT3412, MYT3413, MYT3415, MYT3416, MYT3419, MYT3420, MYT3493, MYT3498, MYT3499, MYT3500, MYT3501, MYT3505, MYT3512, MYT4176, MYT4177, MYT4180, MYT4181, MYT4184).

### Example 34. De Novo Selection of Anti-DLL3 pH Engineered Variants

[0993] Multiple ABPC display systems, including phage display systems and those with ABPCs based on VH domains, have been described in the literature and can be used as a template for selection of pH engineered ABPCs using panning (Scroter C (2015) “A generic approach to engineer antibody pH switches using combinatorial histidine scanning libraries and yeast display” mAbs, 7:1, 138-151; Bonvin P (2015) “De novo isolation of antibodies with pH-dependent binding properties” mAbs, 7:2, 294-302; Traxlmayr P (2014) “Construction of pH-sensitive Her2-binding IgG1-Fc by directed evolution” Biotechnology Journal 9(8): 1013-1022; Gera N (2012) “Design of pH sensitive binding proteins from the hyperthermophilic Sso7 d scaffold” PLOS ONE 7 (11) e48928). pH engineered anti-DLL3 variants were selected by screening a proprietary humanized VH domain phage display library. Humanized VH library was screened against soluble recombinant human DLL3 extracellular domain (R&D Systems, Cat #9749-DL) in three rounds of selections with successively lower concentrations to isolate pH dependent anti-DLL3 VH domains. Briefly, the library was depleted for non-specific binders by incubating with Dynal M-280 streptavidin beads, bound antibodies were separated via a magnet and supernatant was collected for positive selection with human DLL3. Depleted library was further incubated with biotinylated recombinant human DLL3 at pH 7.4 for 1-3 hours at room temperature. Dynal streptavidin beads were added to the mixture to capture human DLL3 bound antibodies and washed 3× with a pH 7.4 buffer. Bound antibodies were eluted from beads using 0.1 M glycine pH 2.7 which was then neutralized with 1M Tris pH 7.4. This procedure was repeated for rounds 2 and 3 with successively lower concentration of biotinylated human DLL3, increased washing frequency and elution with sodium acetate buffer at pH 5.0. pH dependent antibodies enriched at the end of round 3 were analyzed by phage ELISA, sequenced and positive hits with unique CDR3 amino acid sequences were selected for further analysis (SEQ ID NOs: 606-620)

### Example 35. Anti-DLL3 VH-Fc and VH-Fc Converted to IgG Octet

[0994] pH engineered anti-DLL3 variants were generated as VH-Fc fusions by transfection of Expi293 cells with a plasmid encoding for the variable heavy region fused genetically to human IgG1 Fc and as IgG variants by co-transfection of Expi293 cells with a) a heavy chain consisting of variable heavy chain region selected in Example 34 above and constant regions corresponding to human IgG1 isotype, and b) a light chain sequence previously known to pair with a heavy chain closest in sequence to the selected VH domain, using methods known to the art. After allowing for four days of protein expression, cell culture supernatants were collected, quantified by SDS-PAGE analysis (FIG. 17), and the pH dependence of the variant was evaluated using biolayer interferometry (BLI) on an Octet RED 384 or an Octet RED 96e instrument. Briefly, 5 μL of cell culture supernatant was diluted into 195 μL of 1×PBST, pH 7.4, for loading onto the sensor tips. Diluted supernatants were then captured on an anti-human Fc sensor (Forte Bio). A baseline was established using 1×PBST (50 mM Potassium Phosphate Buffer+150 mM NaCl+0.05% Tween 20), pH 7.4, and the sensor was associated with 100 nM of DLL3 (R&D Systems, Cat #9749-DL, Lot No. DFSG0719011) in 1×PBST, pH 7.4, for 120 sec to generate an association curve. In the dissociation phase, the antibody-antigen complex on the sensor was exposed to 1×PBST, pH 7.4, for 300-600 sec. Baseline, association, and dissociation were repeated using 1×PBST, pH 5.4, throughout in a separate condition. Association and dissociation phase curves were examined for each corresponding antibody variant at pH 5.4 and pH 7.4 to inform on two criteria: a) enhanced dissociation (e.g., higher koff values) at pH 5.4 as compared to other starting ABPCs of Examples 9-32, and b) reduced dissociation at pH 7.4 (e.g., lower koff values) compared to pH 5.4 in the antibody variant itself. VH-Fcs and reformatted IgG antibodies that showed either enhanced dissociation at pH 5.4 or reduced dissociation at pH 7.4 or both, as shown in FIG. 18 were selected for further analysis (e.g., MYT1047, MYT1048, MYT1050, MYT1053, MYT1054, MYT1055, MYT1056, MYT1057, MYT1060, MYT1061, MYT1062, MYT1063, MYT4373, MYT4374, and MYT4377).

### Example 36. Anti-DLL3 VH-Fc Epitope Binning

[0995] To identify VH-Fc molecules that bound to different epitopes of DLL3, a sandwich format competition binding assay was performed via Octet. Anti-Human capture (AHC) sensor tips were dipped into a solution of antibody with a known epitope (rovalpituzumab, SC16.4 or hSC16.13) and allowed to bind until saturation was achieved. The sensors were dipped back into 1×PBST, pH 7.4, buffer to achieve a stable baseline before 250 nM of recombinant human DLL3 (R&D Systems, Cat #9749-DL, Lot No. DFSG0719011) was bound to the sensor surface. Following a second baseline step in 1×PBST, pH 7.4, buffer the sensors were dipped into the VH-Fc cell culture supernatant. Additional binding was interpreted as binding to a separate epitope while a lack of binding was interpreted as the two molecules having some overlap in the epitope that they bind. A reduction in signal of 50% or more from the highest observed signal for a given VH-Fc molecule was classified as competition. As shown in FIG. 19, 8 out of 14 variants examined show competition with hSC16.13 (MYT1047, MYT1050, MYT1053, MYT1055, MYT1056, MYT1061, MYT1062, and MYT1063), three variants show competition with SC16.4 (MYT1054, MYT1056, and MYT1060), and two variants show competition with Rovalpituzumab (MYT1048 and MYT1058). In addition, two other variants did not show any competition with the three known tested antibodies (MYT1052 and MYT1057) confirming that they bind distinct epitopes.

### Example 37. Characterization of Binding Affinity for Anti-DLL3 mAbs

[0996] Binding affinity of selected anti-DLL3 pH engineered antibody variants from Examples 9-13 were measured on NCI-H82 cells. 100,000 cells per well were resuspended in 900 μL FC buffer in a 96 well deep well plate. Rovalpituzumab and pH engineered antibody variants were serially diluted at a 1:3 dilution. 100 μL of diluted antibody was added to each well with final concentration ranging from −100 nM to 0.024 μM and incubated for 2 hours at 4° C. Post incubation, the cells were spun at 2000 rpm for 2 min and supernatant was discarded. Cells were washed twice with 500 μL of ice-cold FC buffer and resuspended with 100 μL of FC buffer. The cells were then transferred from the deep well plate to 96 well round bottom plate, spun at 2000 rpm for 2 min and incubated with 100 μL of 10 μg/mL Alexa Fluor 488 conjugated goat anti-human IgG secondary antibody (ThermoFisher Scientific, A11013) for 30 min. Post incubation, cells were washed with FC buffer and resuspended in 100 μL of FC buffer to read on a BD Accuri C6 flow cytometer. Mean fluorescence intensity at each concentration per sample was background subtracted and plotted as shown in FIG. 20. Binding affinity was measured as a dissociation constant KD by GraphPad Prism assuming Michaelis-Menten binding kinetics. MYT1193 and MYT2829 show high affinity binding to cell surface DLL3 on NCI-H82 cells in the pM-nM range confirming that variants created through pH engineering can retain functionally appropriate affinities as compared to their corresponding starting ABPCs (e.g., rovalpituzumab). Variants with dissociation constants KD less than 100 nM were selected for further analysis.

### Example 38. Thermal Stability of Anti-DLL3 mAbs

[0997] Protein melting temperature (Tm) was measured through the use of Differential Scanning Flourimetry (DSF). DSF visualizes protein unfolding by measuring the fluorescent signal from the molecule Sypro Orange (Thermo Scientific cat. no. S6650) as a protein unfolds due to heating. As a protein unfolds it exposes more hydrophilic regions to the Sypro Orange dye, which in turns binds to these hydrophilic regions resulting in increase in signal. The Tm for a protein is calculated as the half-maximal of the unfolding transition and can be visualized by plotting the first derivative of the Sypro Orange signal and finding a local maximum of this derivative plot. 20 μL of protein samples in 1×PBS, pH 7.4, was mixed with 5 μL of 25× Sypro Orange master mix, yielding a final concentration of 5× Sypro Orange. The samples were added to 96-well PCR plates (Thermo Scientific Cat. No. AB-2400/W) and sealed with optical covers (Thermo Scientific Cat. No. 4360954). The PCR plate was inserted into a real-time PCR machine (Thermo Scientific Quant Studio 3) and the plate temperature was stabilized for 3 minutes at 25° C. before ramping to 95° C. by 0.2° C. increments, stabilizing for 1 second before the Sypro Orange signal was measured. The melting temperature (Tm) values for anti-DLL3 variants are shown in FIG. 21. Several variants (MYT1185, MYT1193 and MYT2829) show similar melting temperature values to rovalpituzumab confirming that variants created through pH engineering can retain functionally appropriate thermal stabilities as compared to their corresponding starting ABPCs (e.g., rovalpituzumab). Variants (MYT1185, MYT1193 and MYT2829) with melting temperatures greater than the melting temperature of their corresponding starting ABPC (e.g., rovalpituzumab) minus 10° C. were selected for further analysis.

### Example 39. Specificity of Internalization and Endolysosomal Delivery for Anti-DLL3 mAbs

[0998] Specificity of anti-DLL3 mAbs for DLL3-mediated internalization and endolysosomal delivery into cells was evaluated by measuring the internalization and endolysosomal delivery in Raji cells (DLL3-). Briefly, cells were diluted to 2,000,000 cells/mL and 50 μL seeded into a 96-well flat bottom cell culture plate (Genesee Scientific; 25-109). Anti-DLL3 pH-engineered antibody variants, starting ABPC antibodies, control IgG1 isotype control (Cat #BP0297, Bioxcell), and vehicle control were diluted in native culture media to 100 nM and then mixed 1:1 with 300 nM Zenon pHrodo iFL Human IgG Labeling Reagent (ThermoFisher; Z25611). The mixture was incubated for 20 minutes at room temperature, followed by addition of 50 μL to cells. The mixture of cells, anti-DLL3 antibodies, and Zenon pHrodo iFL Human IgG Labeling Reagent was incubated at 37° C. 5% C02 for 24 hours. Following incubation, 100 μL of ice cold Flow Cytometry (FC) buffer (phosphate buffered saline (PBS) pH 7.4+2 mM ethylenediaminetetraacetic acid (EDTA)+2% (v/v) heat inactivated fetal bovine serum (HI FBS)) was added to each well. Cells were spun down at 4° C. for 2 min at 2000 rpm, washed with 200 μL ice cold FC buffer and resuspended in 100 μL ice cold FC buffer. Mean green fluorescence intensity was detected using a BD Accuri C6 flow cytometer. Data was analyzed using Flowjo analysis software. Internalization and endolysosomal delivery of anti-DLL3 wild type antibody (rovalpituzumab) and variants in non-specific Raji (DLL3-) cells is shown in FIG. 22. Rovalpituzumab and pH engineered variants (MYT1185, MYT1193 and MYT2829) show internalization and endolysosomal delivery similar to a human IgG1 isotype control confirming that pH engineering does not affect the specificity of target-dependent internalization and endolysosomal delivery of anti-DLL3 binding antibodies. Such pH engineered anti-DLL3 antibody variants with mean fluorescence intensity relative to their starting ABPC antibodies less than 2-fold increased as compared to IgG1 isotype control were selected for further analysis (MYT1185, MYT1193 and MYT2829). In this experiment, a drift was observed over time as samples were being read, which was able to be corrected for by reading identical samples treated with rovalpituzumab at the beginning and the end of the experiment.

[0999] The discoveries herein are in contrast to similar engineering on other antigens such as CLEC12a and two other targets wherein multiple variants per target showed enhanced dissociation at low pH, however, despite the favorable pH-dependent binding properties of these variants (which specifically bound CLEC12a and the two other targets), they had less than 10% increase in cell internalization and endolysosomal delivery as compared to the corresponding starting ABPC (e.g., the starting antibody). These variants (which specifically bound CLEC12a and the two other targets) also had similar biophysical characteristics (e.g., antibody expression, thermal stability, affinity at pH 7.4 etc.) to the corresponding starting ABPC (e.g., the starting antibody) confirming that this was not specific to the biophysical properties of the tested variant (i.e. the biophysical properties unrelated to enhanced dissociation at pH 5.4).

### OTHER EMBODIMENTS

[1000] It is to be understood that while the invention has been described in conjunction with the detailed description thereof, the foregoing description is intended to illustrate and not limit the scope of the invention, which is defined by the scope of the appended claims. Other aspects, advantages, and modifications are within the scope of the following claims.

Sequence Appendix
>Heavy Chain of Rovalpituzumab IgG
(SEQ ID NO: 1)
QVQLVQSGAEVKKPGASVKVSCKASGYTFTNYGMNWVRQAPGQGLEWMGWINTYTG
EPTYADDFKGRVTMTTDTSTSTAYMELRSLRSDDTAVYYCARIGDSSPSDYWGQGTLV
TVSS
>Light Chain of Rovalpituzumab IgG
(SEQ ID NO: 2)
EIVMTQSPATLSVSPGERATLSCKASQSVSNDVVWYQQKPGQAPRLLIYYASNRYTGIP
ARFSGSGSGTEFTLTISSLQSEDFAVYYCQQDYTSPWTFGQGTKLEIK
>Heavy Chain CDR1 of Rovalpituzumab
(SEQ ID NO: 3)
KASGYTFTNYGMN
>Heavy Chain CDR2 of Rovalpituzumab
(SEQ ID NO: 4)
WINTYTGEPTYADDFKG
>Heavy Chain CDR3 of Rovalpituzumab
(SEQ ID NO: 5)
ARIGDSSPSDY
>Light Chain CDR1 of Rovalpituzumab
(SEQ ID NO: 6)
KASQSVSNDVV
>Light Chain CDR2 of Rovalpituzumab
(SEQ ID NO: 7)
YASNRYT
>Light Chain CDR3 of Rovalpituzumab
(SEQ ID NO: 8)
QQDYTSPW
>Mature Human DLL3
(SEQ ID NO: 9)
AGVFELQIHSFGPGPGPGAPRSPCSARLPCRLFFRVCLKPGLSEEAAESPCALGAALSARG
PVYTEQPGAPAPDLPLPDGLLQVPFRDAWPGTFSFIIETWREELGDQIGGPAWSLLARVA
GRRRLAAGGPWARDIQRAGAWELRFSYRARCEPPAVGTACTRLCRPRSAPSRCGPGLR
PCAPLEDECEAPLVCRAGCSPEHGFCEQPGECRCLEGWTGPLCTVPVSTSSCLSPRGPSS
ATTGCLVPGPGPCDGNPCANGGSCSETPRSFECTCPRGFYGLRCEVSGVTCADGPCFNG
GLCVGGADPDSAYICHCPPGFQGSNCEKRVDRCSLQPCRNGGLCLDLGHALRCRCRAG
FAGPRCEHDLDDCAGRACANGGTCVEGGGAHRCSCALGFGGRDCRERADPCAARPCA
HGGRCYAHFSGLVCACAPGYMGARCEFPVHPDGASALPAAPPGLRPGDPQRYLLPPAL
GLLVAAGVAGAALLLVHVRRRGHSQDAGSRLLAGTPEPSVHALPDALNNLRTQEGSGD
GPSSSVDWNRPEDVDPQGIYVISAPSIYAREVATPLFPPLHTGRAGQRQHLLFPYPSSILS
VK
>cDNA Encoding Mature Human DLL3
(SEQ ID NO: 10)
GCTGGCGTCTTCGAGCTGCAGATCCACTCTTTCGGGCCGGGTCCAGGCCCTGGGGCC
CCGCGGTCCCCCTGCAGCGCCCGGCTCCCCTGCCGCCTCTTCTTCAGAGTCTGCCTG
AAGCCTGGGCTCTCAGAGGAGGCCGCCGAGTCCCCGTGCGCCCTGGGCGCGGCGCT
GAGTGCGCGCGGACCGGTCTACACCGAGCAGCCCGGAGCGCCCGCGCCTGATCTCC
CACTGCCCGACGGCCTCTTGCAGGTGCCCTTCCGGGACGCCTGGCCTGGCACCTTCT
CTTTCATCATCGAAACCTGGAGAGAGGAGTTAGGAGACCAGATTGGAGGGCCCGCC
TGGAGCCTGCTGGCGCGCGTGGCTGGCAGGCGGCGCTTGGCAGCCGGAGGCCCGTG
GGCCCGGGACATTCAGCGCGCAGGCGCCTGGGAGCTGCGCTTCTCGTACCGCGCGC
GCTGCGAGCCGCCTGCCGTCGGGACCGCGTGCACGCGCCTCTGCCGTCCGCGCAGC
GCCCCCTCGCGGTGCGGTCCGGGACTGCGCCCCTGCGCACCGCTCGAGGACGAATG
TGAGGCGCCGCTGGTGTGCCGAGCAGGCTGCAGCCCTGAGCATGGCTTCTGTGAAC
AGCCCGGTGAATGCCGATGCCTAGAGGGCTGGACTGGACCCCTCTGCACGGTCCCT
GTCTCCACCAGCAGCTGCCTCAGCCCCAGGGGCCCGTCCTCTGCTACCACCGGATGC
CTTGTCCCTGGGCCTGGGCCCTGTGACGGGAACCCGTGTGCCAATGGAGGCAGCTGT
AGTGAGACACCCAGGTCCTTTGAATGCACCTGCCCGCGTGGGTTCTACGGGCTGCGG
TGTGAGGTGAGCGGGGTGACATGTGCAGATGGACCCTGCTTCAACGGCGGCTTGTGT
GTCGGGGGTGCAGACCCTGACTCTGCCTACATCTGCCACTGCCCACCCGGTTTCCAA
GGCTCCAACTGTGAGAAGAGGGTGGACCGGTGCAGCCTGCAGCCATGCCGCAATGG
CGGACTCTGCCTGGACCTGGGCCACGCCCTGCGCTGCCGCTGCCGCGCCGGCTTCGC
GGGTCCTCGCTGCGAGCACGACCTGGACGACTGCGCGGGCCGCGCCTGCGCTAACG
GCGGCACGTGTGTGGAGGGCGGCGGCGCGCACCGCTGCTCCTGCGCGCTGGGCTTC
GGCGGCCGCGACTGCCGCGAGCGCGCGGACCCGTGCGCCGCGCGCCCCTGTGCTCA
CGGCGGCCGCTGCTACGCCCACTTCTCCGGCCTCGTCTGCGCTTGCGCTCCCGGCTA
CATGGGAGCGCGGTGTGAGTTCCCAGTGCACCCCGACGGCGCAAGCGCCTTGCCCG
CGGCCCCGCCGGGCCTCAGGCCCGGGGACCCTCAGCGCTACCTTTTGCCTCCGGCTC
TGGGACTGCTCGTGGCCGCGGGCGTGGCCGGCGCTGCGCTCTTGCTGGTCCACGTGC
GCCGCCGTGGCCACTCCCAGGATGCTGGGTCTCGCTTGCTGGCTGGGACCCCGGAGC
CGTCAGTCCACGCACTCCCGGATGCACTCAACAACCTAAGGACGCAGGAGGGTTCC
GGGGATGGTCCGAGCTCGTCCGTAGATTGGAATCGCCCTGAAGATGTAGACCCTCA
AGGGATTTATGTCATATCTGCTCCTTCCATCTACGCTCGGGAGGTAGCGACGCCCCT
TTTCCCCCCGCTACACACTGGGCGCGCTGGGCAGAGGCAGCACCTGCTTTTTCCCTA
CCCTTCCTCGATTCTGTCCGTGAAA
>Extracellular Domain of DLL3
(SEQ ID NO: 11)
AGVFELQIHSFGPGPGPGAPRSPCSARLPCRLFFRVCLKPGLSEEAAESPCALGAALSARG
PVYTEQPGAPAPDLPLPDGLLQVPFRDAWPGTFSFIIETWREELGDQIGGPAWSLLARVA
GRRRLAAGGPWARDIQRAGAWELRFSYRARCEPPAVGTACTRLCRPRSAPSRCGPGLR
PCAPLEDECEAPLVCRAGCSPEHGFCEQPGECRCLEGWTGPLCTVPVSTSSCLSPRGPSS
ATTGCLVPGPGPCDGNPCANGGSCSETPRSFECTCPRGFYGLRCEVSGVTCADGPCFNG
GLCVGGADPDSAYICHCPPGFQGSNCEKRVDRCSLQPCRNGGLCLDLGHALRCRCRAG
FAGPRCEHDLDDCAGRACANGGTCVEGGGAHRCSCALGFGGRDCRERADPCAARPCA
HGGRCYAHF SGLVCACAPGYMGARCEFPVHPDGASALPAAPPGLRPGDPQRYL
>cDNA Encoding Extracellular Domain of DLL3
(SEQ ID NO: 12)
GCTGGCGTCTTCGAGCTGCAGATCCACTCTTTCGGGCCGGGTCCAGGCCCTGGGGCC
CCGCGGTCCCCCTGCAGCGCCCGGCTCCCCTGCCGCCTCTTCTTCAGAGTCTGCCTG
AAGCCTGGGCTCTCAGAGGAGGCCGCCGAGTCCCCGTGCGCCCTGGGCGCGGCGCT
GAGTGCGCGCGGACCGGTCTACACCGAGCAGCCCGGAGCGCCCGCGCCTGATCTCC
CACTGCCCGACGGCCTCTTGCAGGTGCCCTTCCGGGACGCCTGGCCTGGCACCTTCT
CTTTCATCATCGAAACCTGGAGAGAGGAGTTAGGAGACCAGATTGGAGGGCCCGCC
TGGAGCCTGCTGGCGCGCGTGGCTGGCAGGCGGCGCTTGGCAGCCGGAGGCCCGTG
GGCCCGGGACATTCAGCGCGCAGGCGCCTGGGAGCTGCGCTTCTCGTACCGCGCGC
GCTGCGAGCCGCCTGCCGTCGGGACCGCGTGCACGCGCCTCTGCCGTCCGCGCAGC
GCCCCCTCGCGGTGCGGTCCGGGACTGCGCCCCTGCGCACCGCTCGAGGACGAATG
TGAGGCGCCGCTGGTGTGCCGAGCAGGCTGCAGCCCTGAGCATGGCTTCTGTGAAC
AGCCCGGTGAATGCCGATGCCTAGAGGGCTGGACTGGACCCCTCTGCACGGTCCCT
GTCTCCACCAGCAGCTGCCTCAGCCCCAGGGGCCCGTCCTCTGCTACCACCGGATGC
CTTGTCCCTGGGCCTGGGCCCTGTGACGGGAACCCGTGTGCCAATGGAGGCAGCTGT
AGTGAGACACCCAGGTCCTTTGAATGCACCTGCCCGCGTGGGTTCTACGGGCTGCGG
TGTGAGGTGAGCGGGGTGACATGTGCAGATGGACCCTGCTTCAACGGCGGCTTGTGT
GTCGGGGGTGCAGACCCTGACTCTGCCTACATCTGCCACTGCCCACCCGGTTTCCAA
GGCTCCAACTGTGAGAAGAGGGTGGACCGGTGCAGCCTGCAGCCATGCCGCAATGG
CGGACTCTGCCTGGACCTGGGCCACGCCCTGCGCTGCCGCTGCCGCGCCGGCTTCGC
GGGTCCTCGCTGCGAGCACGACCTGGACGACTGCGCGGGCCGCGCCTGCGCTAACG
GCGGCACGTGTGTGGAGGGCGGCGGCGCGCACCGCTGCTCCTGCGCGCTGGGCTTC
GGCGGCCGCGACTGCCGCGAGCGCGCGGACCCGTGCGCCGCGCGCCCCTGTGCTCA
CGGCGGCCGCTGCTACGCCCACTTCTCCGGCCTCGTCTGCGCTTGCGCTCCCGGCTA
CATGGGAGCGCGGTGTGAGTTCCCAGTGCACCCCGACGGCGCAAGCGCCTTGCCCG
CGGCCCCGCCGGGCCTCAGGCCCGGGGACCCTCAGCGCTACCTT
>Heavy Chain of Rovalpituzumab IgG histidine scanning
variant #1
(SEQ ID NO: 13)
QVQLVQSGAEVKKPGASVKVSCHASGYTFTNYGMNWVRQAPGQGLEWMGWINTYTG
EPTYADDFKGRVTMTTDTSTSTAYMELRSLRSDDTAVYYCARIGDSSPSDYWGQGTLV
TVSS
>Heavy Chain of rovalpituzumab IgG histidine scanning
variant #2
(SEQ ID NO: 14)
QVQLVQSGAEVKKPGASVKVSCKHSGYTFTNYGMNWVRQAPGQGLEWMGWINTYTG
EPTYADDFKGRVTMTTDTSTSTAYMELRSLRSDDTAVYYCARIGDSSPSDYWGQGTLV
TVSS
>Heavy Chain of rovalpituzumab IgG histidine scanning
variant #3
(SEQ ID NO: 15)
QVQLVQSGAEVKKPGASVKVSCKAHGYTFTNYGMNWVRQAPGQGLEWMGWINTYT
GEPTYADDFKGRVTMTTDTSTSTAYMELRSLRSDDTAVYYCARIGDSSPSDYWGQGTL
VTVSS
>Heavy Chain of rovalpituzumab IgG histidine scanning
variant #4
(SEQ ID NO: 16)
QVQLVQSGAEVKKPGASVKVSCKASHYTFTNYGMNWVRQAPGQGLEWMGWINTYTG
EPTYADDFKGRVTMTTDTSTSTAYMELRSLRSDDTAVYYCARIGDSSPSDYWGQGTLV
TVSS
>Heavy Chain of rovalpituzumab IgG histidine scanning
variant #5
(SEQ ID NO: 17)
QVQLVQSGAEVKKPGASVKVSCKASGHTFTNYGMNWVRQAPGQGLEWMGWINTYTG
EPTYADDFKGRVTMTTDTSTSTAYMELRSLRSDDTAVYYCARIGDSSPSDYWGQGTLV
TVSS
>Heavy Chain of rovalpituzumab IgG histidine scanning
variant #6
(SEQ ID NO: 18)
QVQLVQSGAEVKKPGASVKVSCKASGYHFTNYGMNWVRQAPGQGLEWMGWINTYTG
EPTYADDFKGRVTMTTDTSTSTAYMELRSLRSDDTAVYYCARIGDSSPSDYWGQGTLV
TVSS
>Heavy Chain of rovalpituzumab IgG histidine scanning
variant #7
(SEQ ID NO: 19)
QVQLVQSGAEVKKPGASVKVSCKASGYTHTNYGMNWVRQAPGQGLEWMGWINTYT
GEPTYADDFKGRVTMTTDTSTSTAYMELRSLRSDDTAVYYCARIGDSSPSDYWGQGTL
VTVSS
>Heavy Chain of rovalpituzumab IgG histidine scanning
variant #8
(SEQ ID NO: 20)
QVQLVQSGAEVKKPGASVKVSCKASGYTFHNYGMNWVRQAPGQGLEWMGWINTYTG
EPTYADDFKGRVTMTTDTSTSTAYMELRSLRSDDTAVYYCARIGDSSPSDYWGQGTLV
TVSS
>Heavy Chain of rovalpituzumab IgG histidine scanning
variant #9
(SEQ ID NO: 21)
QVQLVQSGAEVKKPGASVKVSCKASGYTFTHYGMNWVRQAPGQGLEWMGWINTYTG
EPTYADDFKGRVTMTTDTSTSTAYMELRSLRSDDTAVYYCARIGDSSPSDYWGQGTLV
TVSS
>Heavy Chain of rovalpituzumab IgG histidine scanning
variant #10
(SEQ ID NO: 22)
QVQLVQSGAEVKKPGASVKVSCKASGYTFTNHGMNWVRQAPGQGLEWMGWINTYTG
EPTYADDFKGRVTMTTDTSTSTAYMELRSLRSDDTAVYYCARIGDSSPSDYWGQGTLV
TVSS
>Heavy Chain of rovalpituzumab IgG histidine scanning
variant #11
(SEQ ID NO: 23)
QVQLVQSGAEVKKPGASVKVSCKASGYTFTNYHMNWVRQAPGQGLEWMGWINTYTG
EPTYADDFKGRVTMTTDTSTSTAYMELRSLRSDDTAVYYCARIGDSSPSDYWGQGTLV
TVSS
>Heavy Chain of rovalpituzumab IgG histidine scanning
variant #12
(SEQ ID NO: 24)
QVQLVQSGAEVKKPGASVKVSCKASGYTFTNYGHNWVRQAPGQGLEWMGWINTYTG
EPTYADDFKGRVTMTTDTSTSTAYMELRSLRSDDTAVYYCARIGDSSPSDYWGQGTLV
TVSS
>Heavy Chain of rovalpituzumab IgG histidine scanning
variant #13
(SEQ ID NO: 25)
QVQLVQSGAEVKKPGASVKVSCKASGYTFTNYGMEIWVRQAPGQGLEWMGWINTYTG
EPTYADDFKGRVTMTTDTSTSTAYMELRSLRSDDTAVYYCARIGDSSPSDYWGQGTLV
TVSS
>Heavy Chain of rovalpituzumab IgG histidine scanning
variant #14
(SEQ ID NO: 26)
QVQLVQSGAEVKKPGASVKVSCKASGYTFTNYGMNWVRQAPGQGLEWMGHINTYTG
EPTYADDFKGRVTMTTDTSTSTAYMELRSLRSDDTAVYYCARIGDSSPSDYWGQGTLV
TVSS
>Heavy Chain of rovalpituzumab IgG histidine scanning
variant #15
(SEQ ID NO: 27)
QVQLVQSGAEVKKPGASVKVSCKASGYTFTNYGMNWVRQAPGQGLEWMGWHNTYT
GEPTYADDFKGRVTMTTDTSTSTAYMELRSLRSDDTAVYYCARIGDSSPSDYWGQGTL
VTVSS
>Heavy Chain of rovalpituzumab IgG histidine scanning
variant #16
(SEQ ID NO: 28)
QVQLVQSGAEVKKPGASVKVSCKASGYTFTNYGMNWVRQAPGQGLEWMGWIHTYTG
EPTYADDFKGRVTMTTDTSTSTAYMELRSLRSDDTAVYYCARIGDSSPSDYWGQGTLV
TVSS
>Heavy Chain of rovalpituzumab IgG histidine scanning
variant #17
(SEQ ID NO: 29)
QVQLVQSGAEVKKPGASVKVSCKASGYTFTNYGMNWVRQAPGQGLEWMGWINHYTG
EPTYADDFKGRVTMTTDTSTSTAYMELRSLRSDDTAVYYCARIGDSSPSDYWGQGTLV
TVSS
>Heavy Chain of rovalpituzumab IgG histidine scanning
variant #18
(SEQ ID NO: 30)
QVQLVQSGAEVKKPGASVKVSCKASGYTFTNYGMNWVRQAPGQGLEWMGWINTHTG
EPTYADDFKGRVTMTTDTSTSTAYMELRSLRSDDTAVYYCARIGDSSPSDYWGQGTLV
TVSS
>Heavy Chain of rovalpituzumab IgG histidine scanning
variant #19
(SEQ ID NO: 31)
QVQLVQSGAEVKKPGASVKVSCKASGYTFTNYGMNWVRQAPGQGLEWMGWINTYHG
EPTYADDFKGRVTMTTDTSTSTAYMELRSLRSDDTAVYYCARIGDSSPSDYWGQGTLV
TVSS
>Heavy Chain of rovalpituzumab IgG histidine scanning
variant #20
(SEQ ID NO: 32)
QVQLVQSGAEVKKPGASVKVSCKASGYTFTNYGMNWVRQAPGQGLEWMGWINTYTH
EPTYADDFKGRVTMTTDTSTSTAYMELRSLRSDDTAVYYCARIGDSSPSDYWGQGTLV
TVSS
>Heavy Chain of rovalpituzumab IgG histidine scanning
variant #21
(SEQ ID NO: 33)
QVQLVQSGAEVKKPGASVKVSCKASGYTFTNYGMNWVRQAPGQGLEWMGWINTYTG
HPTYADDFKGRVTMTTDTSTSTAYMELRSLRSDDTAVYYCARIGDSSPSDYWGQGTLV
TVSS
>Heavy Chain of rovalpituzumab IgG histidine scanning
variant #22
(SEQ ID NO: 34)
QVQLVQSGAEVKKPGASVKVSCKASGYTFTNYGMNWVRQAPGQGLEWMGWINTYTG
EHTYADDFKGRVTMTTDTSTSTAYMELRSLRSDDTAVYYCARIGDSSPSDYWGQGTLV
TVSS
>Heavy Chain of rovalpituzumab IgG histidine scanning
variant #23
(SEQ ID NO: 35)
QVQLVQSGAEVKKPGASVKVSCKASGYTFTNYGMNWVRQAPGQGLEWMGWINTYTG
EPHYADDFKGRVTMTTDTSTSTAYMELRSLRSDDTAVYYCARIGDSSPSDYWGQGTLV
TVSS
>Heavy Chain of rovalpituzumab IgG histidine scanning
variant #24
(SEQ ID NO: 36)
QVQLVQSGAEVKKPGASVKVSCKASGYTFTNYGMNWVRQAPGQGLEWMGWINTYTG
EPTHADDFKGRVTMTTDTSTSTAYMELRSLRSDDTAVYYCARIGDSSPSDYWGQGTLV
TVSS
>Heavy Chain of rovalpituzumab IgG histidine scanning
variant #25
(SEQ ID NO: 37)
QVQLVQSGAEVKKPGASVKVSCKASGYTFTNYGMNWVRQAPGQGLEWMGWINTYTG
EPTYHDDFKGRVTMTTDTSTSTAYMELRSLRSDDTAVYYCARIGDSSPSDYWGQGTLV
TVSS
>Heavy Chain of rovalpituzumab IgG histidine scanning
variant #26
(SEQ ID NO: 38)
QVQLVQSGAEVKKPGASVKVSCKASGYTFTNYGMNWVRQAPGQGLEWMGWINTYTG
EPTYAHDFKGRVTMTTDTSTSTAYMELRSLRSDDTAVYYCARIGDSSPSDYWGQGTLV
TVSS
>Heavy Chain of rovalpituzumab IgG histidine scanning
variant #27
(SEQ ID NO: 39)
QVQLVQSGAEVKKPGASVKVSCKASGYTFTNYGMNWVRQAPGQGLEWMGWINTYTG
EPTYADHFKGRVTMTTDTSTSTAYMELRSLRSDDTAVYYCARIGDSSPSDYWGQGTLV
TVSS
>Heavy Chain of rovalpituzumab IgG histidine scanning
variant #28
(SEQ ID NO: 40)
QVQLVQSGAEVKKPGASVKVSCKASGYTFTNYGMNWVRQAPGQGLEWMGWINTYTG
EPTYADDHKGRVTMTTDTSTSTAYMELRSLRSDDTAVYYCARIGDSSPSDYWGQGTLV
TVSS
>Heavy Chain of rovalpituzumab IgG histidine scanning
variant #29
(SEQ ID NO: 41)
QVQLVQSGAEVKKPGASVKVSCKASGYTFTNYGMNWVRQAPGQGLEWMGWINTYTG
EPTYADDFHGRVTMTTDTSTSTAYMELRSLRSDDTAVYYCARIGDSSPSDYWGQGTLV
TVSS
>Heavy Chain of rovalpituzumab IgG histidine scanning
variant #30
(SEQ ID NO: 42)
QVQLVQSGAEVKKPGASVKVSCKASGYTFTNYGMNWVRQAPGQGLEWMGWINTYTG
EPTYADDFKHRVTMTTDTSTSTAYMELRSLRSDDTAVYYCARIGDSSPSDYWGQGTLV
TVSS
>Heavy Chain of rovalpituzumab IgG histidine scanning
variant #31
(SEQ ID NO: 43)
QVQLVQSGAEVKKPGASVKVSCKASGYTFTNYGMNWVRQAPGQGLEWMGWINTYTG
EPTYADDFKGRVTMTTDTSTSTAYMELRSLRSDDTAVYYCHRIGDSSPSDYWGQGTLV
TVSS
>Heavy Chain of rovalpituzumab IgG histidine scanning
variant #32
(SEQ ID NO: 44)
QVQLVQSGAEVKKPGASVKVSCKASGYTFTNYGMNWVRQAPGQGLEWMGWINTYTG
EPTYADDFKGRVTMTTDTSTSTAYMELRSLRSDDTAVYYCAHIGDSSPSDYWGQGTLV
TVSS
>Heavy Chain of rovalpituzumab IgG histidine scanning
variant #33
(SEQ ID NO: 45)
QVQLVQSGAEVKKPGASVKVSCKASGYTFTNYGMNWVRQAPGQGLEWMGWINTYTG
EPTYADDFKGRVTMTTDTSTSTAYMELRSLRSDDTAVYYCARHGDSSPSDYWGQGTLV
TVSS
>Heavy Chain of rovalpituzumab IgG histidine scanning
variant #34
(SEQ ID NO: 46)
QVQLVQSGAEVKKPGASVKVSCKASGYTFTNYGMNWVRQAPGQGLEWMGWINTYTG
EPTYADDFKGRVTMTTDTSTSTAYMELRSLRSDDTAVYYCARIHDSSPSDYWGQGTLV
TVSS
>Heavy Chain of rovalpituzumab IgG histidine scanning
variant #35
(SEQ ID NO: 47)
QVQLVQSGAEVKKPGASVKVSCKASGYTFTNYGMNWVRQAPGQGLEWMGWINTYTG
EPTYADDFKGRVTMTTDTSTSTAYMELRSLRSDDTAVYYCARIGHSSPSDYWGQGTLV
TVSS
>Heavy Chain of rovalpituzumab IgG histidine scanning
variant #36
(SEQ ID NO: 48)
QVQLVQSGAEVKKPGASVKVSCKASGYTFTNYGMNWVRQAPGQGLEWMGWINTYTG
EPTYADDFKGRVTMTTDTSTSTAYMELRSLRSDDTAVYYCARIGDHSPSDYWGQGTLV
TVSS
>Heavy Chain of rovalpituzumab IgG histidine scanning
variant #37
(SEQ ID NO: 49)
QVQLVQSGAEVKKPGASVKVSCKASGYTFTNYGMNWVRQAPGQGLEWMGWINTYTG
EPTYADDFKGRVTMTTDTSTSTAYMELRSLRSDDTAVYYCARIGDSHPSDYWGQGTLV
TVSS
>Heavy Chain of rovalpituzumab IgG histidine scanning
variant #38
(SEQ ID NO: 50)
QVQLVQSGAEVKKPGASVKVSCKASGYTFTNYGMNWVRQAPGQGLEWMGWINTYTG
EPTYADDFKGRVTMTTDTSTSTAYMELRSLRSDDTAVYYCARIGDSSHSDYWGQGTLV
TVSS
>Heavy Chain of rovalpituzumab IgG histidine scanning
variant #39
(SEQ ID NO: 51)
QVQLVQSGAEVKKPGASVKVSCKASGYTFTNYGMNWVRQAPGQGLEWMGWINTYTG
EPTYADDFKGRVTMTTDTSTSTAYMELRSLRSDDTAVYYCARIGDSSPHDYWGQGTLV
TVSS
>Heavy Chain of rovalpituzumab IgG histidine scanning
variant #40
(SEQ ID NO: 52)
QVQLVQSGAEVKKPGASVKVSCKASGYTFTNYGMNWVRQAPGQGLEWMGWINTYTG
EPTYADDFKGRVTMTTDTSTSTAYMELRSLRSDDTAVYYCARIGDSSPSHYWGQGTLV
TVSS
>Heavy Chain of rovalpituzumab IgG histidine scanning
variant #41
(SEQ ID NO: 53)
QVQLVQSGAEVKKPGASVKVSCKASGYTFTNYGMNWVRQAPGQGLEWMGWINTYTG
EPTYADDFKGRVTMTTDTSTSTAYMELRSLRSDDTAVYYCARIGDSSPSDHWGQGTLV
TVSS
>Light Chain of Rovalpituzumab IgG histidine scanning
variant #1
(SEQ ID NO: 54)
EIVMTQSPATLSVSPGERATLSCHASQSVSNDVVWYQQKPGQAPRLLIYYASNRYTGIP
ARFSGSGSGTEFTLTISSLQSEDFAVYYCQQDYTSPWTFGQGTKLEIK
>Light Chain of Rovalpituzumab IgG histidine scanning
variant #2
(SEQ ID NO: 55)
EIVMTQSPATLSVSPGERATLSCKHSQSVSNDVVWYQQKPGQAPRLLIYYASNRYTGIP
ARFSGSGSGTEFTLTISSLQSEDFAVYYCQQDYTSPWTFGQGTKLEIK
>Light Chain of Rovalpituzumab IgG histidine scanning
variant #3
(SEQ ID NO: 56)
EIVMTQSPATLSVSPGERATLSCKAHQSVSNDVVWYQQKPGQAPRLLIYYASNRYTGIP
ARFSGSGSGTEFTLTISSLQSEDFAVYYCQQDYTSPWTFGQGTKLEIK
>Light Chain of Rovalpituzumab IgG histidine scanning
variant #4
(SEQ ID NO: 57)
EIVMTQSPATLSVSPGERATLSCKASHSVSNDVVWYQQKPGQAPRLLIYYASNRYTGIP
ARFSGSGSGTEFTLTISSLQSEDFAVYYCQQDYTSPWTFGQGTKLEIK
>Light Chain of Rovalpituzumab IgG histidine scanning
variant #5
(SEQ ID NO: 58)
EIVMTQSPATLSVSPGERATLSCKASQHVSNDVVWYQQKPGQAPRLLIYYASNRYTGIP
ARFSGSGSGTEFTLTISSLQSEDFAVYYCQQDYTSPWTFGQGTKLEIK
>Light Chain of Rovalpituzumab IgG histidine scanning
variant #6
(SEQ ID NO: 59)
EIVMTQSPATLSVSPGERATLSCKASQSHSNDVVWYQQKPGQAPRLLIYYASNRYTGIP
ARFSGSGSGTEFTLTISSLQSEDFAVYYCQQDYTSPWTFGQGTKLEIK
>Light Chain of Rovalpituzumab IgG histidine scanning
variant #7
(SEQ ID NO: 60)
EIVMTQSPATLSVSPGERATLSCKASQSVHNDVVWYQQKPGQAPRLLIYYASNRYTGIP
ARFSGSGSGTEFTLTISSLQSEDFAVYYCQQDYTSPWTFGQGTKLEIK
>Light Chain of Rovalpituzumab IgG histidine scanning
variant #8
(SEQ ID NO: 61)
EIVMTQSPATLSVSPGERATLSCKASQSVSHDVVWYQQKPGQAPRLLIYYASNRYTGIP
ARFSGSGSGTEFTLTISSLQSEDFAVYYCQQDYTSPWTFGQGTKLEIK
>Light Chain of Rovalpituzumab IgG histidine scanning
variant #9
(SEQ ID NO: 62)
EIVMTQSPATLSVSPGERATLSCKASQSVSNHVVWYQQKPGQAPRLLIYYASNRYTGIP
ARFSGSGSGTEFTLTISSLQSEDFAVYYCQQDYTSPWTFGQGTKLEIK
>Light Chain of Rovalpituzumab IgG histidine scanning
variant #10
(SEQ ID NO: 63)
EIVMTQSPATLSVSPGERATLSCKASQSVSNDHVWYQQKPGQAPRLLIYYASNRYTGIP
ARFSGSGSGTEFTLTISSLQSEDFAVYYCQQDYTSPWTFGQGTKLEIK
>Light Chain of Rovalpituzumab IgG histidine scanning
variant #11
(SEQ ID NO: 64)
EIVMTQSPATLSVSPGERATLSCKASQSVSNDVHWYQQKPGQAPRLLIYYASNRYTGIP
ARFSGSGSGTEFTLTISSLQSEDFAVYYCQQDYTSPWTFGQGTKLEIK
>Light Chain of Rovalpituzumab IgG histidine scanning
variant #12
(SEQ ID NO: 65)
EIVMTQSPATLSVSPGERATLSCKASQSVSNDVVWYQQKPGQAPRLLIYHASNRYTGIP
ARFSGSGSGTEFTLTISSLQSEDFAVYYCQQDYTSPWTFGQGTKLEIK
>Light Chain of Rovalpituzumab IgG histidine scanning
variant #13
(SEQ ID NO: 66)
EIVMTQSPATLSVSPGERATLSCKASQSVSNDVVWYQQKPGQAPRLLIYYHSNRYTGIP
ARFSGSGSGTEFTLTISSLQSEDFAVYYCQQDYTSPWTFGQGTKLEIK
>Light Chain of Rovalpituzumab IgG histidine scanning
variant #14
(SEQ ID NO: 67)
EIVMTQSPATLSVSPGERATLSCKASQSVSNDVVWYQQKPGQAPRLLIYYAHNRYTGIP
ARFSGSGSGTEFTLTISSLQSEDFAVYYCQQDYTSPWTFGQGTKLEIK
>Light Chain of Rovalpituzumab IgG histidine scanning
variant #15
(SEQ ID NO: 68)
EIVMTQSPATLSVSPGERATLSCKASQSVSNDVVWYQQKPGQAPRLLIYYASHRYTGIP
ARFSGSGSGTEFTLTISSLQSEDFAVYYCQQDYTSPWTFGQGTKLEIK
>Light Chain of Rovalpituzumab IgG histidine scanning
variant #16
(SEQ ID NO: 69)
EIVMTQSPATLSVSPGERATLSCKASQSVSNDVVWYQQKPGQAPRLLIYYASNHYTGIP
ARFSGSGSGTEFTLTISSLQSEDFAVYYCQQDYTSPWTFGQGTKLEIK
>Light Chain of Rovalpituzumab IgG histidine scanning
variant #17
(SEQ ID NO: 70)
EIVMTQSPATLSVSPGERATLSCKASQSVSNDVVWYQQKPGQAPRLLIYYASNRHTGIP
ARFSGSGSGTEFTLTISSLQSEDFAVYYCQQDYTSPWTFGQGTKLEIK
>Light Chain of Rovalpituzumab IgG histidine scanning
variant #18
(SEQ ID NO: 71)
EIVMTQSPATLSVSPGERATLSCKASQSVSNDVVWYQQKPGQAPRLLIYYASNRYHGIP
ARFSGSGSGTEFTLTISSLQSEDFAVYYCQQDYTSPWTFGQGTKLEIK
>Light Chain of Rovalpituzumab IgG histidine scanning
variant #19
(SEQ ID NO: 72)
EIVMTQSPATLSVSPGERATLSCKASQSVSNDVVWYQQKPGQAPRLLIYYASNRYTGIP
ARFSGSGSGTEFTLTISSLQSEDFAVYYCHQDYTSPWTFGQGTKLEIK
>Light Chain of Rovalpituzumab IgG histidine scanning
variant #20
(SEQ ID NO: 73
EIVMTQSPATLSVSPGERATLSCKASQSVSNDVVWYQQKPGQAPRLLIYYASNRYTGIP
ARFSGSGSGTEFTLTISSLQSEDFAVYYCQHDYTSPWTFGQGTKLEIK
>Light Chain of Rovalpituzumab IgG histidine scanning
variant #21
(SEQ ID NO: 74)
EIVMTQSPATLSVSPGERATLSCKASQSVSNDVVWYQQKPGQAPRLLIYYASNRYTGIP
ARFSGSGSGTEFTLTISSLQSEDFAVYYCQQHYTSPWTFGQGTKLEIK
>Light Chain of Rovalpituzumab IgG histidine scanning
variant #22
(SEQ ID NO: 75)
EIVMTQSPATLSVSPGERATLSCKASQSVSNDVVWYQQKPGQAPRLLIYYASNRYTGIP
ARFSGSGSGTEFTLTISSLQSEDFAVYYCQQDHTSPWTFGQGTKLEIK
>Light Chain of Rovalpituzumab IgG histidine scanning
variant #23
(SEQ ID NO: 76)
EIVMTQSPATLSVSPGERATLSCKASQSVSNDVVWYQQKPGQAPRLLIYYASNRYTGIP
ARFSGSGSGTEFTLTISSLQSEDFAVYYCQQDYHSPWTFGQGTKLEIK
>Light Chain of Rovalpituzumab IgG histidine scanning
variant #24
(SEQ ID NO: 77)
EIVMTQSPATLSVSPGERATLSCKASQSVSNDVVWYQQKPGQAPRLLIYYASNRYTGIP
ARFSGSGSGTEFTLTISSLQSEDFAVYYCQQDYTHPWTFGQGTKLEIK
>Light Chain of Rovalpituzumab IgG histidine scanning
variant #25
(SEQ ID NO: 78)
EIVMTQSPATLSVSPGERATLSCKASQSVSNDVVWYQQKPGQAPRLLIYYASNRYTGIP
ARFSGSGSGTEFTLTISSLQSEDFAVYYCQQDYTSHWTFGQGTKLEIK
>Light Chain of Rovalpituzumab IgG histidine scanning
variant #26
(SEQ ID NO: 79)
EIVMTQSPATLSVSPGERATLSCKASQSVSNDVVWYQQKPGQAPRLLIYYASNRYTGIP
ARFSGSGSGTEFTLTISSLQSEDFAVYYCQQDYTSPHTFGQGTKLEIK
>Light Chain of Rovalpituzumab IgG histidine scanning
variant #27
(SEQ ID NO: 80)
EIVMTQSPATLSVSPGERATLSCKASQSVSNDVVWYQQKPGQAPRLLIYYASNRYTGIP
ARFSGSGSGTEFTLTISSLQSEDFAVYYCQQDYTSPWHFGQGTKLEIK
>Heavy Chain Combinations of Rovalpituzumab IgG histidine
scanning variant #1
(SEQ ID NO: 81)
QVQLVQSGAEVKKPGASVKVSCKASGYTHTNYGMNWVRQAPGQGLEWMGWINTHTGEPTYA
DDFKGRVTMTTDTSTSTAYMELRSLRSDDTAVYYCARIGDSSPSDYWGQGTLVTVSS
>Heavy Chain Combinations of Rovalpituzumab IgG histidine
scanning variant #2
(SEQ ID NO: 82)
QVQLVQSGAEVKKPGASVKVSCKASGYTFTHYGMNWVRQAPGQGLEWMGWINTHTGEPTYA
DDFKGRVTMTTDTSTSTAYMELRSLRSDDTAVYYCARIGDSSPSDYWGQGTLVTVSS
>Heavy Chain Combinations of Rovalpituzumab IgG histidine
scanning variant #3
(SEQ ID NO: 83)
QVQLVQSGAEVKKPGASVKVSCKASGYTFTHYGMNWVRQAPGQGLEWMGWINTYHGEPTYA
DDFKGRVTMTTDTSTSTAYMELRSLRSDDTAVYYCARIGDSSPSDYWGQGTLVTVSS
>Heavy Chain Combinations of Rovalpituzumab IgG histidine
scanning variant #4
(SEQ ID NO: 84)
QVQLVQSGAEVKKPGASVKVSCKASGYTFTHYGMNWVRQAPGQGLEWMGWINTYTGEPTYA
DDFKGRVTMTTDTSTSTAYMELRSLRSDDTAVYYCARIGDSSPHDYWGQGTLVTVSS
>Heavy Chain Combinations of Rovalpituzumab IgG histidine
scanning variant #5
(SEQ ID NO: 85)
QVQLVQSGAEVKKPGASVKVSCKASGYTFTNYGMNWVRQAPGQGLEWMGWINTHHGEPTYA
DDFKGRVTMTTDTSTSTAYMELRSLRSDDTAVYYCARIGDSSPSDYWGQGTLVTVSS
>Heavy Chain Combinations of Rovalpituzumab IgG histidine
scanning variant #6
(SEQ ID NO: 86)
QVQLVQSGAEVKKPGASVKVSCKASGYTFTNYGMNWVRQAPGQGLEWMGWINTHTGEPTYA
DDFKGRVTMTTDTSTSTAYMELRSLRSDDTAVYYCARIGDSSPHDYWGQGTLVTVSS
>Heavy Chain Combinations of Rovalpituzumab IgG histidine
scanning variant #7
(SEQ ID NO: 87)
QVQLVQSGAEVKKPGASVKVSCKASGYTHTHYGMNWVRQAPGQGLEWMGWINTHTGEPTYA
DDFKGRVTMTTDTSTSTAYMELRSLRSDDTAVYYCARIGDSSPSDYWGQGTLVTVSS
>Heavy Chain Combinations of Rovalpituzumab IgG histidine
scanning variant #8
(SEQ ID NO: 88)
QVQLVQSGAEVKKPGASVKVSCKASGYTFTHYGMNWVRQAPGQGLEWMGWINTHHGEPTYA
DDFKGRVTMTTDTSTSTAYMELRSLRSDDTAVYYCARIGDSSPSDYWGQGTLVTVSS
>Heavy Chain Combinations of Rovalpituzumab IgG histidine
scanning variant #9
(SEQ ID NO: 89)
QVQLVQSGAEVKKPGASVKVSCKASGYTFTHYGMNWVRQAPGQGLEWMGWINTHTGEPTYA
DDFKGRVTMTTDTSTSTAYMELRSLRSDDTAVYYCARIGDSSPHDYWGQGTLVTVSS
>Heavy Chain Combinations of Rovalpituzumab IgG histidine
scanning variant #10
(SEQ ID NO: 90)
QVQLVQSGAEVKKPGASVKVSCKASGYTFTHYGMNWVRQAPGQGLEWMGWINTYHGEPTYA
DDFKGRVTMTTDTSTSTAYMELRSLRSDDTAVYYCARIGDSSPHDYWGQGTLVTVSS
>Heavy Chain Combinations of Rovalpituzumab IgG histidine
scanning variant #11
(SEQ ID NO: 91)
QVQLVQSGAEVKKPGASVKVSCKASGYTFTNYGMNWVRQAPGQGLEWMGWINTHHGEPTYA
DDFKGRVTMTTDTSTSTAYMELRSLRSDDTAVYYCARIGDSSPHDYWGQGTLVTVSS
>Heavy Chain Combinations of Rovalpituzumab IgG histidine
scanning variant #12
(SEQ ID NO: 92)
QVQLVQSGAEVKKPGASVKVSCKASGYTHTHYGMNWVRQAPGQGLEWMGWINTYTGEPTYA
DDFKGRVTMTTDTSTSTAYMELRSLRSDDTAVYYCARIGDSSPSDYWGQGTLVTVSS
>Heavy Chain Combinations of Rovalpituzumab IgG histidine
scanning variant #13
(SEQ ID NO: 93)
QVQLVQSGAEVKKPGASVKVSCKASGYTHTNYGMNWVRQAPGQGLEWMGWINTYTGEPTYA
DDFKGRVTMTTDTSTSTAYMELRSLRSDDTAVYYCARIGDSSPHDYWGQGTLVTVSS
>Heavy Chain Combinations of Rovalpituzumab IgG histidine
scanning variant #14
(SEQ ID NO: 94)
QVQLVQSGAEVKKPGASVKVSCKASGYTFTNYGMNWVRQAPGQGLEWMGWINTYHGEPTYA
DDFKGRVTMTTDTSTSTAYMELRSLRSDDTAVYYCARIGDSSPHDYWGQGTLVTVSS
>Heavy Chain Combinations of Rovalpituzumab IgG histidine
scanning variant #15
(SEQ ID NO: 95)
QVQLVQSGAEVKKPGASVKVSCKASGYTHTHYGMNWVRQAPGQGLEWMGWINTYHGEPTYA
DDFKGRVTMTTDTSTSTAYMELRSLRSDDTAVYYCARIGDSSPSDYWGQGTLVTVSS
>Heavy Chain Combinations of Rovalpituzumab IgG histidine
scanning variant #16
(SEQ ID NO: 96)
QVQLVQSGAEVKKPGASVKVSCKASGYTHTHYGMNWVRQAPGQGLEWMGWINTYTGEPTYA
DDFKGRVTMTTDTSTSTAYMELRSLRSDDTAVYYCARIGDSSPHDYWGQGTLVTVSS
>Heavy Chain Combinations of Rovalpituzumab IgG histidine
scanning variant #17
(SEQ ID NO: 97)
QVQLVQSGAEVKKPGASVKVSCKASGYTHTNYGMNWVRQAPGQGLEWMGWINTHHGEPTYA
DDFKGRVTMTTDTSTSTAYMELRSLRSDDTAVYYCARIGDSSPSDYWGQGTLVTVSS
>Heavy Chain Combinations of Rovalpituzumab IgG histidine
scanning variant #18
(SEQ ID NO: 98)
QVQLVQSGAEVKKPGASVKVSCKASGYTHTNYGMNWVRQAPGQGLEWMGWINTHTGEPTYA
DDFKGRVTMTTDTSTSTAYMELRSLRSDDTAVYYCARIGDSSPHDYWGQGTLVTVSS
>Light Chain Combinations of Rovalpituzumab IgG histidine
scanning variant #1
(SEQ ID NO: 99)
EIVMTQSPATLSVSPGERATLSCKAHQSVSNDVVWYQQKPGQAPRLLIYHASNRYTGIPARFSGS
GSGTEFTLTISSLQSEDFAVYYCQQDYTSPWTFGQGTKLEIK
>Light Chain Combinations of Rovalpituzumab IgG histidine
scanning variant #2
(SEQ ID NO: 100)
EIVMTQSPATLSVSPGERATLSCKAHQSVSNDVVWYQQKPGQAPRLLIYYASNRYTGIPARFSGS
GSGTEFTLTISSLQSEDFAVYYCQQDYHSPWTFGQGTKLEIK
>Light Chain Combinations of Rovalpituzumab IgG histidine
scanning variant #3
(SEQ ID NO: 101)
EIVMTQSPATLSVSPGERATLSCKAHQSVSNDVVWYQQKPGQAPRLLIYYASNRYTGIPARFSGS
GSGTEFTLTISSLQSEDFAVYYCQQDYTHPWTFGQGTKLEIK
>Light Chain Combinations of Rovalpituzumab IgG histidine
scanning variant #4
(SEQ ID NO: 102)
EIVMTQSPATLSVSPGERATLSCKAHQSVSNDVVWYQQKPGQAPRLLIYYASNRYTGIPARFSGS
GSGTEFTLTISSLQSEDFAVYYCQQDYTSPWHFGQGTKLEIK
>Light Chain Combinations of Rovalpituzumab IgG histidine
scanning variant #5
(SEQ ID NO: 103)
EIVMTQSPATLSVSPGERATLSCKASQSVSNDVVWYQQKPGQAPRLLIYHASNRYTGIPARFSGS
GSGTEFTLTISSLQSEDFAVYYCQQDYHSPWTFGQGTKLEIK
>Light Chain Combinations of Rovalpituzumab IgG histidine
scanning variant #6
(SEQ ID NO: 104)
EIVMTQSPATLSVSPGERATLSCKASQSVSNDVVWYQQKPGQAPRLLIYHASNRYTGIPARFSGS
GSGTEFTLTISSLQSEDFAVYYCQQDYTHPWTFGQGTKLEIK
>Light Chain Combinations of Rovalpituzumab IgG histidine
scanning variant #7
(SEQ ID NO: 105)
EIVMTQSPATLSVSPGERATLSCKASQSVSNDVVWYQQKPGQAPRLLIYHASNRYTGIPARFSGS
GSGTEFTLTISSLQSEDFAVYYCQQDYTSPWHFGQGTKLEIK
>Light Chain Combinations of Rovalpituzumab IgG histidine
scanning variant #8
(SEQ ID NO: 106)
EIVMTQSPATLSVSPGERATLSCKASQSVSNDVVWYQQKPGQAPRLLIYYASNRYTGIPARFSGS
GSGTEFTLTISSLQSEDFAVYYCQQDYFIHPWTFGQGTKLEIK
>Light Chain Combinations of Rovalpituzumab IgG histidine
scanning variant #9
(SEQ ID NO: 107)
EIVMTQSPATLSVSPGERATLSCKASQSVSNDVVWYQQKPGQAPRLLIYYASNRYTGIPARFSGS
GSGTEFTLTISSLQSEDFAVYYCQQDYHSPWHFGQGTKLEIK
>Light Chain Combinations of Rovalpituzumab IgG histidine
scanning variant #10
(SEQ ID NO: 108)
EIVMTQSPATLSVSPGERATLSCKASQSVSNDVVWYQQKPGQAPRLLIYYASNRYTGIPARFSGS
GSGTEFTLTISSLQSEDFAVYYCQQDYTHPWHFGQGTKLEIK
>Light Chain Combinations of Rovalpituzumab IgG histidine
scanning variant #11
(SEQ ID NO: 109)
EIVMTQSPATLSVSPGERATLSCKAHQSVSNDVVWYQQKPGQAPRLLIYHASNRYTGIPARFSGS
GSGTEFTLTISSLQSEDFAVYYCQQDYHSPWTFGQGTKLEIK
>Light Chain Combinations of Rovalpituzumab IgG histidine
scanning variant #12
(SEQ ID NO: 110)
EIVMTQSPATLSVSPGERATLSCKAHQSVSNDVVWYQQKPGQAPRLLIYHASNRYTGIPARFSGS
GSGTEFTLTISSLQSEDFAVYYCQQDYTHPWTFGQGTKLEIK
>Light Chain Combinations of Rovalpituzumab IgG histidine
scanning variant #13
(SEQ ID NO: 111)
EIVMTQSPATLSVSPGERATLSCKAHQSVSNDVVWYQQKPGQAPRLLIYHASNRYTGIPARFSGS
GSGTEFTLTISSLQSEDFAVYYCQQDYTSPWHFGQGTKLEIK
>Light Chain Combinations of Rovalpituzumab IgG histidine
scanning variant #14
(SEQ ID NO: 112)
EIVMTQSPATLSVSPGERATLSCKAHQSVSNDVVWYQQKPGQAPRLLIYYASNRYTGIPARFSGS
GSGTEFTLTISSLQSEDFAVYYCQQDYFIHPWTFGQGTKLEIK
>Light Chain Combinations of Rovalpituzumab IgG histidine
scanning variant #15
(SEQ ID NO: 113)
EIVMTQSPATLSVSPGERATLSCKAHQSVSNDVVWYQQKPGQAPRLLIYYASNRYTGIPARFSGS
GSGTEFTLTISSLQSEDFAVYYCQQDYHSPWHFGQGTKLEIK
>Light Chain Combinations of Rovalpituzumab IgG histidine
scanning variant #16
(SEQ ID NO: 114)
EIVMTQSPATLSVSPGERATLSCKAHQSVSNDVVWYQQKPGQAPRLLIYYASNRYTGIPARFSGS
GSGTEFTLTISSLQSEDFAVYYCQQDYTHPWHFGQGTKLEIK
>Light Chain Combinations of Rovalpituzumab IgG histidine
scanning variant #17
(SEQ ID NO: 115)
EIVMTQSPATLSVSPGERATLSCKASQSVSNDVVWYQQKPGQAPRLLIYHASNRYTGIPARFSGS
GSGTEFTLTISSLQSEDFAVYYCQQDYFIHPWTFGQGTKLEIK
>Light Chain Combinations of Rovalpituzumab IgG histidine
scanning variant #18
(SEQ ID NO: 116)
EIVMTQSPATLSVSPGERATLSCKASQSVSNDVVWYQQKPGQAPRLLIYHASNRYTGIPARFSGS
GSGTEFTLTISSLQSEDFAVYYCQQDYHSPWHFGQGTKLEIK
>Light Chain Combinations of Rovalpituzumab IgG histidine
scanning variant #19
(SEQ ID NO: 117)
EIVMTQSPATLSVSPGERATLSCKASQSVSNDVVWYQQKPGQAPRLLIYHASNRYTGIPARFSGS
GSGTEFTLTISSLQSEDFAVYYCQQDYTHPWHFGQGTKLEIK
>Light Chain Combinations of Rovalpituzumab IgG histidine
scanning variant #20
(SEQ ID NO: 118)
EIVMTQSPATLSVSPGERATLSCKASQSVSNDVVWYQQKPGQAPRLLIYYASNRYTGIPARFSGS
GSGTEFTLTISSLQSEDFAVYYCQQDYFIHPWHFGQGTKLEIK
>Heavy Chain of SC16.4 IgG
(SEQ ID NO: 119)
QIQLVQSGPELKKPGETVKISCKASGYTFTDYSMHWVKQAPGKGLKWMGWINTETGEPGYADD
FKGRFAFSLETSASTAYLQINNLKNEDTATYFCARYDGYAMDYWGQGTSVTVSS
>Light Chain of SC16.4 IgG
(SEQ ID NO: 120)
DIQMTQTTSSLSASLGDRVTISCRASQDISNYLNWYQQKPDGTVKLLIYYTSRLHSGVPSRFSGSG
SGTDYSLTISNLELEDIATYFCQQGDMLPWTFGGGTKLEIK
>Heavy Chain of SC16.4 IgG histidine scanning variant #1
(SEQ ID NO: 121)
QIQLVQSGPELKKPGETVKISCKASHYTFTDYSMHWVKQAPGKGLKWMGWINTETGEPGYADD
FKGRFAFSLETSASTAYLQINNLKNEDTATYFCARYDGYAMDYWGQGTSVTVSS
>Heavy Chain of SC16.4 IgG histidine scanning variant #2
(SEQ ID NO: 122)
QIQLVQSGPELKKPGETVKISCKASGHTFTDYSMHWVKQAPGKGLKWMGWINTETGEPGYADD
FKGRFAFSLETSASTAYLQINNLKNEDTATYFCARYDGYAMDYWGQGTSVTVSS
>Heavy Chain of SC16.4 IgG histidine scanning variant #3
(SEQ ID NO: 123)
QIQLVQSGPELKKPGETVKISCKASGYHFTDYSMHWVKQAPGKGLKWMGWINTETGEPGYAD
DFKGRFAFSLETSASTAYLQINNLKNEDTATYFCARYDGYAMDYWGQGTSVTVSS
>Heavy Chain of SC16.4 IgG histidine scanning variant #4
(SEQ ID NO: 124)
QIQLVQSGPELKKPGETVKISCKASGYTHTDYSMHWVKQAPGKGLKWMGWINTETGEPGYAD
DFKGRFAFSLETSASTAYLQINNLKNEDTATYFCARYDGYAMDYWGQGTSVTVSS
>Heavy Chain of SC16.4 IgG histidine scanning variant #5
(SEQ ID NO: 125)
QIQLVQSGPELKKPGETVKISCKASGYTFHDYSMHWVKQAPGKGLKWMGWINTETGEPGYAD
DFKGRFAFSLETSASTAYLQINNLKNEDTATYFCARYDGYAMDYWGQGTSVTVSS
>Heavy Chain of SC16.4 IgG histidine scanning variant #6
(SEQ ID NO: 126)
QIQLVQSGPELKKPGETVKISCKASGYTFTHYSMHWVKQAPGKGLKWMGWINTETGEPGYADD
FKGRFAFSLETSASTAYLQINNLKNEDTATYFCARYDGYAMDYWGQGTSVTVSS
>Heavy Chain of SC16.4 IgG histidine scanning variant #7
(SEQ ID NO: 127)
QIQLVQSGPELKKPGETVKISCKASGYTFTDHSMHWVKQAPGKGLKWMGWINTETGEPGYADD
FKGRFAFSLETSASTAYLQINNLKNEDTATYFCARYDGYAMDYWGQGTSVTVSS
>Heavy Chain of SC16.4 IgG histidine scanning variant #8
(SEQ ID NO: 128)
QIQLVQSGPELKKPGETVKISCKASGYTFTDYHMHWVKQAPGKGLKWMGWINTETGEPGYAD
DFKGRFAFSLETSASTAYLQINNLKNEDTATYFCARYDGYAMDYWGQGTSVTVSS
>Heavy Chain of SC16.4 IgG histidine scanning variant #9
(SEQ ID NO: 129)
QIQLVQSGPELKKPGETVKISCKASGYTFTDYSHHWVKQAPGKGLKWMGWINTETGEPGYADD
FKGRFAFSLETSASTAYLQINNLKNEDTATYFCARYDGYAMDYWGQGTSVTVSS
>Heavy Chain of SC16.4 IgG histidine scanning variant #10
(SEQ ID NO: 130)
QIQLVQSGPELKKPGETVKISCKASGYTFTDYSMAWVKQAPGKGLKWMGWINTETGEPGYADD
FKGRFAFSLETSASTAYLQINNLKNEDTATYFCARYDGYAMDYWGQGTSVTVSS
>Heavy Chain of SC16.4 IgG histidine scanning variant #11
(SEQ ID NO: 131)
QIQLVQSGPELKKPGETVKISCKASGYTFTDYSMHWVKQAPGKGLKWMGHINTETGEPGYADD
FKGRFAFSLETSASTAYLQINNLKNEDTATYFCARYDGYAMDYWGQGTSVTVSS
>Heavy Chain of SC16.4 IgG histidine scanning variant #12
(SEQ ID NO: 132)
QIQLVQSGPELKKPGETVKISCKASGYTFTDYSMHWVKQAPGKGLKWMGWHNTETGEPGYAD
DFKGRFAFSLETSASTAYLQINNLKNEDTATYFCARYDGYAMDYWGQGTSVTVSS
>Heavy Chain of SC16.4 IgG histidine scanning variant #13
(SEQ ID NO: 133)
QIQLVQSGPELKKPGETVKISCKASGYTFTDYSMHWVKQAPGKGLKWMGWIHTETGEPGYADD
FKGRFAFSLETSASTAYLQINNLKNEDTATYFCARYDGYAMDYWGQGTSVTVSS
>Heavy Chain of SC16.4 IgG histidine scanning variant #14
(SEQ ID NO: 134)
QIQLVQSGPELKKPGETVKISCKASGYTFTDYSMHWVKQAPGKGLKWMGWINHETGEPGYAD
DFKGRFAFSLETSASTAYLQINNLKNEDTATYFCARYDGYAMDYWGQGTSVTVSS
>Heavy Chain of SC16.4 IgG histidine scanning variant #15
(SEQ ID NO: 135)
QIQLVQSGPELKKPGETVKISCKASGYTFTDYSMHWVKQAPGKGLKWMGWINTHTGEPGYAD
DFKGRFAFSLETSASTAYLQINNLKNEDTATYFCARYDGYAMDYWGQGTSVTVSS
>Heavy Chain of SC16.4 IgG histidine scanning variant #16
(SEQ ID NO: 136)
QIQLVQSGPELKKPGETVKISCKASGYTFTDYSMHWVKQAPGKGLKWMGWINTEHGEPGYAD
DFKGRFAFSLETSASTAYLQINNLKNEDTATYFCARYDGYAMDYWGQGTSVTVSS
>Heavy Chain of SC16.4 IgG histidine scanning variant #17
(SEQ ID NO: 137)
QIQLVQSGPELKKPGETVKISCKASGYTFTDYSMHWVKQAPGKGLKWMGWINTETHEPGYADD
FKGRFAFSLETSASTAYLQINNLKNEDTATYFCARYDGYAMDYWGQGTSVTVSS
>Heavy Chain of SC16.4 IgG histidine scanning variant #18
(SEQ ID NO: 138)
QIQLVQSGPELKKPGETVKISCKASGYTFTDYSMHWVKQAPGKGLKWMGWINTETGHPGYAD
DFKGRFAFSLETSASTAYLQINNLKNEDTATYFCARYDGYAMDYWGQGTSVTVSS
>Heavy Chain of SC16.4 IgG histidine scanning variant #19
(SEQ ID NO: 139)
QIQLVQSGPELKKPGETVKISCKASGYTFTDYSMHWVKQAPGKGLKWMGWINTETGEHGYAD
DFKGRFAFSLETSASTAYLQINNLKNEDTATYFCARYDGYAMDYWGQGTSVTVSS
>Heavy Chain of SC16.4 IgG histidine scanning variant #20
(SEQ ID NO: 140)
QIQLVQSGPELKKPGETVKISCKASGYTFTDYSMHWVKQAPGKGLKWMGWINTETGEPHYADD
FKGRFAFSLETSASTAYLQINNLKNEDTATYFCARYDGYAMDYWGQGTSVTVSS
>Heavy Chain of SC16.4 IgG histidine scanning variant #21
(SEQ ID NO: 141)
QIQLVQSGPELKKPGETVKISCKASGYTFTDYSMHWVKQAPGKGLKWMGWINTETGEPGHADD
FKGRFAFSLETSASTAYLQINNLKNEDTATYFCARYDGYAMDYWGQGTSVTVSS
>Heavy Chain of SC16.4 IgG histidine scanning variant #22
(SEQ ID NO: 142)
QIQLVQSGPELKKPGETVKISCKASGYTFTDYSMHWVKQAPGKGLKWMGWINTETGEPGYHDD
FKGRFAFSLETSASTAYLQINNLKNEDTATYFCARYDGYAMDYWGQGTSVTVSS
>Heavy Chain of SC16.4 IgG histidine scanning variant #23
(SEQ ID NO: 143)
QIQLVQSGPELKKPGETVKISCKASGYTFTDYSMHWVKQAPGKGLKWMGWINTETGEPGYAHD
FKGRFAFSLETSASTAYLQINNLKNEDTATYFCARYDGYAMDYWGQGTSVTVSS
>Heavy Chain of SC16.4 IgG histidine scanning variant #24
(SEQ ID NO: 144)
QIQLVQSGPELKKPGETVKISCKASGYTFTDYSMHWVKQAPGKGLKWMGWINTETGEPGYADH
FKGRFAFSLETSASTAYLQINNLKNEDTATYFCARYDGYAMDYWGQGTSVTVSS
>Heavy Chain of SC16.4 IgG histidine scanning variant #25
(SEQ ID NO: 145)
QIQLVQSGPELKKPGETVKISCKASGYTFTDYSMHWVKQAPGKGLKWMGWINTETGEPGYADD
HKGRFAFSLETSASTAYLQINNLKNEDTATYFCARYDGYAMDYWGQGTSVTVSS
>Heavy Chain of SC16.4 IgG histidine scanning variant #26
(SEQ ID NO: 146)
QIQLVQSGPELKKPGETVKISCKASGYTFTDYSMHWVKQAPGKGLKWMGWINTETGEPGYADD
FHGRFAFSLETSASTAYLQINNLKNEDTATYFCARYDGYAMDYWGQGTSVTVSS
>Heavy Chain of SC16.4 IgG histidine scanning variant #27
(SEQ ID NO: 147)
QIQLVQSGPELKKPGETVKISCKASGYTFTDYSMHWVKQAPGKGLKWMGWINTETGEPGYADD
FKHRFAFSLETSASTAYLQINNLKNEDTATYFCARYDGYAMDYWGQGTSVTVSS
>Heavy Chain of SC16.4 IgG histidine scanning variant #28
(SEQ ID NO: 148)
QIQLVQSGPELKKPGETVKISCKASGYTFTDYSMHWVKQAPGKGLKWMGWINTETGEPGYADD
FKGRFAFSLETSASTAYLQINNLKNEDTATYFCHRYDGYAMDYWGQGTSVTVSS
>Heavy Chain of SC16.4 IgG histidine scanning variant #29
(SEQ ID NO: 149)
QIQLVQSGPELKKPGETVKISCKASGYTFTDYSMHWVKQAPGKGLKWMGWINTETGEPGYADD
FKGRFAFSLETSASTAYLQINNLKNEDTATYFCAHYDGYAMDYWGQGTSVTVSS
>Heavy Chain of SC16.4 IgG histidine scanning variant #30
(SEQ ID NO: 150)
QIQLVQSGPELKKPGETVKISCKASGYTFTDYSMHWVKQAPGKGLKWMGWINTETGEPGYADD
FKGRFAFSLETSASTAYLQINNLKNEDTATYFCARHDGYAMDYWGQGTSVTVSS
>Heavy Chain of SC16.4 IgG histidine scanning variant #31
(SEQ ID NO: 151)
QIQLVQSGPELKKPGETVKISCKASGYTFTDYSMHWVKQAPGKGLKWMGWINTETGEPGYADD
FKGRFAFSLETSASTAYLQINNLKNEDTATYFCARYHGYAMDYWGQGTSVTVSS
>Heavy Chain of SC16.4 IgG histidine scanning variant #32
(SEQ ID NO: 152)
QIQLVQSGPELKKPGETVKISCKASGYTFTDYSMHWVKQAPGKGLKWMGWINTETGEPGYADD
FKGRFAFSLETSASTAYLQINNLKNEDTATYFCARYDHYAMDYWGQGTSVTVSS
>Heavy Chain of SC16.4 IgG histidine scanning variant #33
(SEQ ID NO: 153)
QIQLVQSGPELKKPGETVKISCKASGYTFTDYSMHWVKQAPGKGLKWMGWINTETGEPGYADD
FKGRFAFSLETSASTAYLQINNLKNEDTATYFCARYDGHAMDYWGQGTSVTVSS
>Heavy Chain of SC16.4 IgG histidine scanning variant #34
(SEQ ID NO: 154)
QIQLVQSGPELKKPGETVKISCKASGYTFTDYSMHWVKQAPGKGLKWMGWINTETGEPGYADD
FKGRFAFSLETSASTAYLQINNLKNEDTATYFCARYDGYHMDYWGQGTSVTVSS
>Heavy Chain of SC16.4 IgG histidine scanning variant #35
(SEQ ID NO: 155)
QIQLVQSGPELKKPGETVKISCKASGYTFTDYSMHWVKQAPGKGLKWMGWINTETGEPGYADD
FKGRFAFSLETSASTAYLQINNLKNEDTATYFCARYDGYAHDYWGQGTSVTVSS
>Heavy Chain of SC16.4 IgG histidine scanning variant #36
(SEQ ID NO: 156)
QIQLVQSGPELKKPGETVKISCKASGYTFTDYSMHWVKQAPGKGLKWMGWINTETGEPGYADD
FKGRFAFSLETSASTAYLQINNLKNEDTATYFCARYDGYAMHYWGQGTSVTVSS
>Heavy Chain of SC16.4 IgG histidine scanning variant #37
(SEQ ID NO: 157)
QIQLVQSGPELKKPGETVKISCKASGYTFTDYSMHWVKQAPGKGLKWMGWINTETGEPGYADD
FKGRFAFSLETSASTAYLQINNLKNEDTATYFCARYDGYAMDHWGQGTSVTVSS
>Light Chain of SC16.4 IgG histidine scanning variant #1
(SEQ ID NO: 158)
DIQMTQTTSSLSASLGDRVTISCHASQDISNYLNWYQQKPDGTVKLLIYYTSRLHSGVPSRFSGSG
SGTDYSLTISNLELEDIATYFCQQGDMLPWTFGGGTKLEIK
>Light Chain of SC16.4 IgG histidine scanning variant #2
(SEQ ID NO: 159)
DIQMTQTTSSLSASLGDRVTISCRHSQDISNYLNWYQQKPDGTVKLLIYYTSRLHSGVPSRFSGSG
SGTDYSLTISNLELEDIATYFCQQGDMLPWTFGGGTKLEIK
>Light Chain of SC16.4 IgG histidine scanning variant #3
(SEQ ID NO: 160)
DIQMTQTTSSLSASLGDRVTISCRAHQDISNYLNWYQQKPDGTVKLLIYYTSRLHSGVPSRFSGS
GSGTDYSLTISNLELEDIATYFCQQGDMLPWTFGGGTKLEIK
>Light Chain of SC16.4 IgG histidine scanning variant #4
(SEQ ID NO: 161)
DIQMTQTTSSLSASLGDRVTISCRASHDISNYLNWYQQKPDGTVKLLIYYTSRLHSGVPSRFSGSG
SGTDYSLTISNLELEDIATYFCQQGDMLPWTFGGGTKLEIK
>Light Chain of SC16.4 IgG histidine scanning variant #5
(SEQ ID NO: 162)
DIQMTQTTSSLSASLGDRVTISCRASQHISNYLNWYQQKPDGTVKLLIYYTSRLHSGVPSRFSGSG
SGTDYSLTISNLELEDIATYFCQQGDMLPWTFGGGTKLEIK
>Light Chain of SC16.4 IgG histidine scanning variant #6
(SEQ ID NO: 163)
DIQMTQTTSSLSASLGDRVTISCRASQDHSNYLNWYQQKPDGTVKLLIYYTSRLHSGVPSRFSGS
GSGTDYSLTISNLELEDIATYFCQQGDMLPWTFGGGTKLEIK
>Light Chain of SC16.4 IgG histidine scanning variant #7
(SEQ ID NO: 164)
DIQMTQTTSSLSASLGDRVTISCRASQDIHNYLNWYQQKPDGTVKLLIYYTSRLHSGVPSRFSGS
GSGTDYSLTISNLELEDIATYFCQQGDMLPWTFGGGTKLEIK
>Light Chain of SC16.4 IgG histidine scanning variant #8
(SEQ ID NO: 165)
DIQMTQTTSSLSASLGDRVTISCRASQDISHYLNWYQQKPDGTVKLLIYYTSRLHSGVPSRFSGSG
SGTDYSLTISNLELEDIATYFCQQGDMLPWTFGGGTKLEIK
>Light Chain of SC16.4 IgG histidine scanning variant #9
(SEQ ID NO: 166)
DIQMTQTTSSLSASLGDRVTISCRASQDISNHLNWYQQKPDGTVKLLIYYTSRLHSGVPSRFSGSG
SGTDYSLTISNLELEDIATYFCQQGDMLPWTFGGGTKLEIK
>Light Chain of SC16.4 IgG histidine scanning variant #10
(SEQ ID NO: 167)
DIQMTQTTSSLSASLGDRVTISCRASQDISNYHNWYQQKPDGTVKLLIYYTSRLHSGVPSRFSGSG
SGTDYSLTISNLELEDIATYFCQQGDMLPWTFGGGTKLEIK
>Light Chain of SC16.4 IgG histidine scanning variant #11
(SEQ ID NO: 168)
DIQMTQTTSSLSASLGDRVTISCRASQDISNYLHWYQQKPDGTVKLLIYYTSRLHSGVPSRFSGSG
SGTDYSLTISNLELEDIATYFCQQGDMLPWTFGGGTKLEIK
>Light Chain of SC16.4 IgG histidine scanning variant #12
(SEQ ID NO: 169)
DIQMTQTTSSLSASLGDRVTISCRASQDISNYLNWYQQKPDGTVKLLIYYHSRLHSGVPSRFSGSG
SGTDYSLTISNLELEDIATYFCQQGDMLPWTFGGGTKLEIK
>Light Chain of SC16.4 IgG histidine scanning variant #13
(SEQ ID NO: 170)
DIQMTQTTSSLSASLGDRVTISCRASQDISNYLNWYQQKPDGTVKLLIYYTHRLHSGVPSRFSGS
GSGTDYSLTISNLELEDIATYFCQQGDMLPWTFGGGTKLEIK
>Light Chain of SC16.4 IgG histidine scanning variant #14
(SEQ ID NO: 171)
DIQMTQTTSSLSASLGDRVTISCRASQDISNYLNWYQQKPDGTVKLLIYYTSHLHSGVPSRFSGSG
SGTDYSLTISNLELEDIATYFCQQGDMLPWTFGGGTKLEIK
>Light Chain of SC16.4 IgG histidine scanning variant #15
(SEQ ID NO: 172)
DIQMTQTTSSLSASLGDRVTISCRASQDISNYLNWYQQKPDGTVKLLIYYTSRHHSGVPSRFSGSG
SGTDYSLTISNLELEDIATYFCQQGDMLPWTFGGGTKLEIK
>Light Chain of SC16.4 IgG histidine scanning variant #16
(SEQ ID NO: 173)
DIQMTQTTSSLSASLGDRVTISCRASQDISNYLNWYQQKPDGTVKLLIYYTSRLASGVPSRFSGSG
SGTDYSLTISNLELEDIATYFCQQGDMLPWTFGGGTKLEIK
>Light Chain of SC16.4 IgG histidine scanning variant #17
(SEQ ID NO: 174)
DIQMTQTTSSLSASLGDRVTISCRASQDISNYLNWYQQKPDGTVKLLIYYTSRLHHGVPSRFSGS
GSGTDYSLTISNLELEDIATYFCQQGDMLPWTFGGGTKLEIK
>Light Chain of SC16.4 IgG histidine scanning variant #18
(SEQ ID NO: 175)
DIQMTQTTSSLSASLGDRVTISCRASQDISNYLNWYQQKPDGTVKLLIYYTSRLHSGVPSRFSGSG
SGTDYSLTISNLELEDIATYFCHQGDMLPWTFGGGTKLEIK
>Light Chain of SC16.4 IgG histidine scanning variant #19
(SEQ ID NO: 176)
DIQMTQTTSSLSASLGDRVTISCRASQDISNYLNWYQQKPDGTVKLLIYYTSRLHSGVPSRFSGSG
SGTDYSLTISNLELEDIATYFCQHGDMLPWTFGGGTKLEIK
>Light Chain of SC16.4 IgG histidine scanning variant #20
(SEQ ID NO: 177)
DIQMTQTTSSLSASLGDRVTISCRASQDISNYLNWYQQKPDGTVKLLIYYTSRLHSGVPSRFSGSG
SGTDYSLTISNLELEDIATYFCQQHDMLPWTFGGGTKLEIK
>Light Chain of SC16.4 IgG histidine scanning variant #21
(SEQ ID NO: 178)
DIQMTQTTSSLSASLGDRVTISCRASQDISNYLNWYQQKPDGTVKLLIYYTSRLHSGVPSRFSGSG
SGTDYSLTISNLELEDIATYFCQQGHMLPWTFGGGTKLEIK
>Light Chain of SC16.4 IgG histidine scanning variant #22
(SEQ ID NO: 179)
DIQMTQTTSSLSASLGDRVTISCRASQDISNYLNWYQQKPDGTVKLLIYYTSRLHSGVPSRFSGSG
SGTDYSLTISNLELEDIATYFCQQGDHLPWTFGGGTKLEIK
>Light Chain of SC16.4 IgG histidine scanning variant #23
(SEQ ID NO: 180)
DIQMTQTTSSLSASLGDRVTISCRASQDISNYLNWYQQKPDGTVKLLIYYTSRLHSGVPSRFSGSG
SGTDYSLTISNLELEDIATYFCQQGDMHPWTFGGGTKLEIK
>Light Chain of SC16.4 IgG histidine scanning variant #24
(SEQ ID NO: 181)
DIQMTQTTSSLSASLGDRVTISCRASQDISNYLNWYQQKPDGTVKLLIYYTSRLHSGVPSRFSGSG
SGTDYSLTISNLELEDIATYFCQQGDMLHWTFGGGTKLEIK
>Light Chain of SC16.4 IgG histidine scanning variant #25
(SEQ ID NO: 182)
DIQMTQTTSSLSASLGDRVTISCRASQDISNYLNWYQQKPDGTVKLLIYYTSRLHSGVPSRFSGSG
SGTDYSLTISNLELEDIATYFCQQGDMLPHTFGGGTKLEIK
>Light Chain of SC16.4 IgG histidine scanning variant #26
(SEQ ID NO: 183)
DIQMTQTTSSLSASLGDRVTISCRASQDISNYLNWYQQKPDGTVKLLIYYTSRLHSGVPSRFSGSG
SGTDYSLTISNLELEDIATYFCQQGDMLPWHFGGGTKLEIK
>Light Chain of SC16.4 IgG histidine scanning variant #27
(SEQ ID NO: 184)
DIQMTQTTSSLSASLGDRVTISCRASQDISNYLNWYQQKPDGTVKLLIYHTSRLHSGVPSRFSGSG
SGTDYSLTISNLELEDIATYFCQQGDMLPWTFGGGTKLEIK
>Heavy Chain Combinations of SC16.4 IgG histidine scanning
variant #1
(SEQ ID NO: 185)
QIQLVQSGPELKKPGETVKISCKASGYTFTDHSMHWVKQAPGKGLKWMGWINTETGHPGYAD
DFKGRFAFSLETSASTAYLQINNLKNEDTATYFCARYDGYAMDYWGQGTSVTVSS
>Heavy Chain Combinations of SC16.4 IgG histidine scanning
variant #2
(SEQ ID NO: 186)
QIQLVQSGPELKKPGETVKISCKASGYTFTDHSMHWVKQAPGKGLKWMGWINTETGEPGYAHD
FKGRFAFSLETSASTAYLQINNLKNEDTATYFCARYDGYAMDYWGQGTSVTVSS
>Heavy Chain Combinations of SC16.4 IgG histidine scanning
variant #3
(SEQ ID NO: 187)
QIQLVQSGPELKKPGETVKISCKASGYTFTDHSMHWVKQAPGKGLKWMGWINTETGEPGYADD
FKGRFAFSLETSASTAYLQINNLKNEDTATYFCARHDGYAMDYWGQGTSVTVSS
>Heavy Chain Combinations of SC16.4 IgG histidine scanning
variant #4
(SEQ ID NO: 188)
QIQLVQSGPELKKPGETVKISCKASGYTFTDHSMHWVKQAPGKGLKWMGWINTETGEPGYADD
FKGRFAFSLETSASTAYLQINNLKNEDTATYFCARYDGYAMHYWGQGTSVTVSS
>Heavy Chain Combinations of SC16.4 IgG histidine scanning
variant #5
(SEQ ID NO: 189)
QIQLVQSGPELKKPGETVKISCKASGYTFTDYSMHWVKQAPGKGLKWMGWINTETGHPGYAH
DFKGRFAFSLETSASTAYLQINNLKNEDTATYFCARYDGYAMDYWGQGTSVTVSS
>Heavy Chain Combinations of SC16.4 IgG histidine scanning
variant #6
(SEQ ID NO: 190)
QIQLVQSGPELKKPGETVKISCKASGYTFTDYSMHWVKQAPGKGLKWMGWINTETGHPGYAD
DFKGRFAFSLETSASTAYLQINNLKNEDTATYFCARHDGYAMDYWGQGTSVTVSS
>Heavy Chain Combinations of SC16.4 IgG histidine scanning
variant #7
(SEQ ID NO: 191)
QIQLVQSGPELKKPGETVKISCKASGYTFTDYSMHWVKQAPGKGLKWMGWINTETGHPGYAD
DFKGRFAFSLETSASTAYLQINNLKNEDTATYFCARYDGYAMHYWGQGTSVTVSS
>Heavy Chain Combinations of SC16.4 IgG histidine scanning
variant #8
(SEQ ID NO: 192)
QIQLVQSGPELKKPGETVKISCKASGYTFTDYSMHWVKQAPGKGLKWMGWINTETGEPGYAHD
FKGRFAFSLETSASTAYLQINNLKNEDTATYFCARHDGYAMDYWGQGTSVTVSS
>Heavy Chain Combinations of SC16.4 IgG histidine scanning
variant #9
(SEQ ID NO: 193)
QIQLVQSGPELKKPGETVKISCKASGYTFTDYSMHWVKQAPGKGLKWMGWINTETGEPGYAHD
FKGRFAFSLETSASTAYLQINNLKNEDTATYFCARYDGYAMHYWGQGTSVTVSS
>Heavy Chain Combinations of SC16.4 IgG histidine scanning
variant #10
(SEQ ID NO: 194)
QIQLVQSGPELKKPGETVKISCKASGYTFTDYSMHWVKQAPGKGLKWMGWINTETGEPGYADD
FKGRFAFSLETSASTAYLQINNLKNEDTATYFCARHDGYAMHYWGQGTSVTVSS
>Heavy Chain Combinations of SC16.4 IgG histidine scanning
variant #11
(SEQ ID NO: 195)
QIQLVQSGPELKKPGETVKISCKASGYTFTDHSMHWVKQAPGKGLKWMGWINTETGHPGYAH
DFKGRFAFSLETSASTAYLQINNLKNEDTATYFCARYDGYAMDYWGQGTSVTVSS
>Heavy Chain Combinations of SC16.4 IgG histidine scanning
variant #12
(SEQ ID NO: 196)
QIQLVQSGPELKKPGETVKISCKASGYTFTDHSMHWVKQAPGKGLKWMGWINTETGHPGYAD
DFKGRFAFSLETSASTAYLQINNLKNEDTATYFCARHDGYAMDYWGQGTSVTVSS
>Heavy Chain Combinations of SC16.4 IgG histidine scanning
variant #13
(SEQ ID NO: 197)
QIQLVQSGPELKKPGETVKISCKASGYTFTDHSMHWVKQAPGKGLKWMGWINTETGHPGYAD
DFKGRFAFSLETSASTAYLQINNLKNEDTATYFCARYDGYAMHYWGQGTSVTVSS
>Heavy Chain Combinations of SC16.4 IgG histidine scanning
variant #14
(SEQ ID NO: 198)
QIQLVQSGPELKKPGETVKISCKASGYTFTDHSMHWVKQAPGKGLKWMGWINTETGEPGYAHD
FKGRFAFSLETSASTAYLQINNLKNEDTATYFCARHDGYAMDYWGQGTSVTVSS
>Heavy Chain Combinations of SC16.4 IgG histidine scanning
variant #15
(SEQ ID NO: 199)
QIQLVQSGPELKKPGETVKISCKASGYTFTDHSMHWVKQAPGKGLKWMGWINTETGEPGYAHD
FKGRFAFSLETSASTAYLQINNLKNEDTATYFCARYDGYAMHYWGQGTSVTVSS
>Heavy Chain Combinations of SC16.4 IgG histidine scanning
variant #16
(SEQ ID NO: 200)
QIQLVQSGPELKKPGETVKISCKASGYTFTDHSMHWVKQAPGKGLKWMGWINTETGEPGYADD
FKGRFAFSLETSASTAYLQINNLKNEDTATYFCARHDGYAMHYWGQGTSVTVSS
>Heavy Chain Combinations of SC16.4 IgG histidine scanning
variant #17
(SEQ ID NO: 201)
QIQLVQSGPELKKPGETVKISCKASGYTFTDYSMHWVKQAPGKGLKWMGWINTETGHPGYAH
DFKGRFAFSLETSASTAYLQINNLKNEDTATYFCARHDGYAMDYWGQGTSVTVSS
>Heavy Chain Combinations of SC16.4 IgG histidine scanning
variant #18
(SEQ ID NO: 202)
QIQLVQSGPELKKPGETVKISCKASGYTFTDYSMHWVKQAPGKGLKWMGWINTETGHPGYAH
DFKGRFAFSLETSASTAYLQINNLKNEDTATYFCARYDGYAMHYWGQGTSVTVSS
>Heavy Chain Combinations of SC16.4 IgG histidine scanning
variant #19
(SEQ ID NO: 203)
QIQLVQSGPELKKPGETVKISCKASGYTFTDYSMHWVKQAPGKGLKWMGWINTETGHPGYAD
DFKGRFAFSLETSASTAYLQINNLKNEDTATYFCARHDGYAMHYWGQGTSVTVSS
>Heavy Chain Combinations of SC16.4 IgG histidine scanning
variant #20
(SEQ ID NO: 204)
QIQLVQSGPELKKPGETVKISCKASGYTFTDYSMHWVKQAPGKGLKWMGWINTETGEPGYAHD
FKGRFAFSLETSASTAYLQINNLKNEDTATYFCARHDGYAMHYWGQGTSVTVSS
>Heavy Chain Combinations of SC16.4 IgG histidine scanning
variant #21
(SEQ ID NO: 205)
QIQLVQSGPELKKPGETVKISCKASGYTFTDHSMHWVKQAPGKGLKWMGWINTETGHPGYAH
DFKGRFAFSLETSASTAYLQINNLKNEDTATYFCARHDGYAMDYWGQGTSVTVSS
>Heavy Chain Combinations of SC16.4 IgG histidine scanning
variant #22
(SEQ ID NO: 206)
QIQLVQSGPELKKPGETVKISCKASGYTFTDHSMHWVKQAPGKGLKWMGWINTETGHPGYAH
DFKGRFAFSLETSASTAYLQINNLKNEDTATYFCARYDGYAMHYWGQGTSVTVSS
>Heavy Chain Combinations of SC16.4 IgG histidine scanning
variant #23
(SEQ ID NO: 207)
QIQLVQSGPELKKPGETVKISCKASGYTFTDHSMHWVKQAPGKGLKWMGWINTETGHPGYAD
DFKGRFAFSLETSASTAYLQINNLKNEDTATYFCARHDGYAMHYWGQGTSVTVSS
>Heavy Chain Combinations of SC16.4 IgG histidine scanning
variant #24
(SEQ ID NO: 208)
QIQLVQSGPELKKPGETVKISCKASGYTFTDHSMHWVKQAPGKGLKWMGWINTETGEPGYAHD
FKGRFAFSLETSASTAYLQINNLKNEDTATYFCARHDGYAMHYWGQGTSVTVSS
>Heavy Chain Combinations of SC16.4 IgG histidine scanning
variant #25
(SEQ ID NO: 209)
QIQLVQSGPELKKPGETVKISCKASGYTFTDYSMHWVKQAPGKGLKWMGWINTETGHPGYAH
DFKGRFAFSLETSASTAYLQINNLKNEDTATYFCARHDGYAMHYWGQGTSVTVSS
>Heavy Chain Combinations of SC16.4 IgG histidine scanning
variant #26
(SEQ ID NO: 210)
QIQLVQSGPELKKPGETVKISCKASGYTFTDHSMHWVKQAPGKGLKWMGWINTETGHPGYAH
DFKGRFAFSLETSASTAYLQINNLKNEDTATYFCARHDGYAMHYWGQGTSVTVSS
>Heavy Chain Combinations of SC16.4 IgG histidine scanning
variant #27
(SEQ ID NO: 211)
QIQLVQSGPELKKPGETVKISCKASGYTFTDHSMHWVKQAPGKGLKWMGWINTETGEPGYADD
FKGRFAFSLETSASTAYLQINNLKNEDTATYFCARYHGYAMDYWGQGTSVTVSS
>Heavy Chain Combinations of SC16.4 IgG histidine scanning
variant #28
(SEQ ID NO: 212)
QIQLVQSGPELKKPGETVKISCKASGYTFTDYSMHWVKQAPGKGLKWMGWINTETGHPGYAD
DFKGRFAFSLETSASTAYLQINNLKNEDTATYFCARYHGYAMDYWGQGTSVTVSS
>Heavy Chain Combinations of SC16.4 IgG histidine scanning
variant #29
(SEQ ID NO: 213)
QIQLVQSGPELKKPGETVKISCKASGYTFTDYSMHWVKQAPGKGLKWMGWINTETGEPGYAHD
FKGRFAFSLETSASTAYLQINNLKNEDTATYFCARYHGYAMDYWGQGTSVTVSS
>Heavy Chain Combinations of SC16.4 IgG histidine scanning
variant #30
(SEQ ID NO: 214)
QIQLVQSGPELKKPGETVKISCKASGYTFTDYSMHWVKQAPGKGLKWMGWINTETGEPGYADD
FKGRFAFSLETSASTAYLQINNLKNEDTATYFCARHHGYAMDYWGQGTSVTVSS
>Heavy Chain Combinations of SC16.4 IgG histidine scanning
variant #31
(SEQ ID NO: 215)
QIQLVQSGPELKKPGETVKISCKASGYTFTDYSMHWVKQAPGKGLKWMGWINTETGEPGYADD
FKGRFAFSLETSASTAYLQINNLKNEDTATYFCARYHGYAMHYWGQGTSVTVSS
>Heavy Chain Combinations of SC16.4 IgG histidine scanning
variant #32
(SEQ ID NO: 216)
QIQLVQSGPELKKPGETVKISCKASGYTFTDHSMHWVKQAPGKGLKWMGWINTETGHPGYAD
DFKGRFAFSLETSASTAYLQINNLKNEDTATYFCARYHGYAMDYWGQGTSVTVSS
>Heavy Chain Combinations of SC16.4 IgG histidine scanning
variant #33
(SEQ ID NO: 217)
QIQLVQSGPELKKPGETVKISCKASGYTFTDHSMHWVKQAPGKGLKWMGWINTETGEPGYAHD
FKGRFAFSLETSASTAYLQINNLKNEDTATYFCARYHGYAMDYWGQGTSVTVSS
>Heavy Chain Combinations of SC16.4 IgG histidine scanning
variant #34
(SEQ ID NO: 218)
QIQLVQSGPELKKPGETVKISCKASGYTFTDHSMHWVKQAPGKGLKWMGWINTETGEPGYADD
FKGRFAFSLETSASTAYLQINNLKNEDTATYFCARHHGYAMDYWGQGTSVTVSS
>Heavy Chain Combinations of SC16.4 IgG histidine scanning
variant #35
(SEQ ID NO: 219)
QIQLVQSGPELKKPGETVKISCKASGYTFTDHSMHWVKQAPGKGLKWMGWINTETGEPGYADD
FKGRFAFSLETSASTAYLQINNLKNEDTATYFCARYHGYAMHYWGQGTSVTVSS
>Heavy Chain Combinations of SC16.4 IgG histidine scanning
variant #36
(SEQ ID NO: 220)
QIQLVQSGPELKKPGETVKISCKASGYTFTDYSMHWVKQAPGKGLKWMGWINTETGHPGYAH
DFKGRFAFSLETSASTAYLQINNLKNEDTATYFCARYHGYAMDYWGQGTSVTVSS
>Heavy Chain Combinations of SC16.4 IgG histidine scanning
variant #37
(SEQ ID NO: 221)
QIQLVQSGPELKKPGETVKISCKASGYTFTDYSMHWVKQAPGKGLKWMGWINTETGHPGYAD
DFKGRFAFSLETSASTAYLQINNLKNEDTATYFCARHEIGYAMDYWGQGTSVTVSS
>Heavy Chain Combinations of SC16.4 IgG histidine scanning
variant #38
(SEQ ID NO: 222)
QIQLVQSGPELKKPGETVKISCKASGYTFTDYSMHWVKQAPGKGLKWMGWINTETGHPGYAD
DFKGRFAFSLETSASTAYLQINNLKNEDTATYFCARYHGYAMHYWGQGTSVTVSS
>Heavy Chain Combinations of SC16.4 IgG histidine scanning
variant #39
(SEQ ID NO: 223)
QIQLVQSGPELKKPGETVKISCKASGYTFTDYSMHWVKQAPGKGLKWMGWINTETGEPGYAHD
FKGRFAFSLETSASTAYLQINNLKNEDTATYFCARHHGYAMDYWGQGTSVTVSS
>Heavy Chain Combinations of SC16.4 IgG histidine scanning
variant #40
(SEQ ID NO: 224)
QIQLVQSGPELKKPGETVKISCKASGYTFTDYSMHWVKQAPGKGLKWMGWINTETGEPGYAHD
FKGRFAFSLETSASTAYLQINNLKNEDTATYFCARYHGYAMHYWGQGTSVTVSS
>Heavy Chain Combinations of SC16.4 IgG histidine scanning
variant #41
(SEQ ID NO: 225)
QIQLVQSGPELKKPGETVKISCKASGYTFTDYSMHWVKQAPGKGLKWMGWINTETGEPGYADD
FKGRFAFSLETSASTAYLQINNLKNEDTATYFCARHHGYAMHYWGQGTSVTVSS
>Light Chain Combinations of SC16.4 IgG histidine scanning
variant #1
(SEQ ID NO: 226)
DIQMTQTTSSLSASLGDRVTISCRASQDHSNHLNWYQQKPDGTVKLLIYYTSRLHSGVPSRFSGS
GSGTDYSLTISNLELEDIATYFCQQGDMLPWTFGGGTKLEIK
>Light Chain Combinations of SC16.4 IgG histidine scanning
variant #2
(SEQ ID NO: 227)
DIQMTQTTSSLSASLGDRVTISCRASQDHSNYLHWYQQKPDGTVKLLIYYTSRLHSGVPSRFSGS
GSGTDYSLTISNLELEDIATYFCQQGDMLPWTFGGGTKLEIK
>Light Chain Combinations of SC16.4 IgG histidine scanning
variant #3
(SEQ ID NO: 228)
DIQMTQTTSSLSASLGDRVTISCRASQDHSNYLNWYQQKPDGTVKLLIYYTSRLHSGVPSRFSGS
GSGTDYSLTISNLELEDIATYFCQQGDHLPWTFGGGTKLEIK
>Light Chain Combinations of SC16.4 IgG histidine scanning
variant #4
(SEQ ID NO: 229)
DIQMTQTTSSLSASLGDRVTISCRASQDISNHLHWYQQKPDGTVKLLIYYTSRLHSGVPSRFSGSG
SGTDYSLTISNLELEDIATYFCQQGDMLPWTFGGGTKLEIK
>Light Chain Combinations of SC16.4 IgG histidine scanning
variant #5
(SEQ ID NO: 230)
DIQMTQTTSSLSASLGDRVTISCRASQDISNHLNWYQQKPDGTVKLLIYYTSRLHSGVPSRFSGSG
SGTDYSLTISNLELEDIATYFCQQGDHLPWTFGGGTKLEIK
>Light Chain Combinations of SC16.4 IgG histidine scanning
variant #6
(SEQ ID NO: 231)
DIQMTQTTSSLSASLGDRVTISCRASQDISNYLHWYQQKPDGTVKLLIYYTSRLHSGVPSRFSGSG
SGTDYSLTISNLELEDIATYFCQQGDHLPWTFGGGTKLEIK
>Light Chain Combinations of SC16.4 IgG histidine scanning
variant #7
(SEQ ID NO: 232)
DIQMTQTTSSLSASLGDRVTISCRASQDHSNHLHWYQQKPDGTVKLLIYYTSRLHSGVPSRFSGS
GSGTDYSLTISNLELEDIATYFCQQGDMLPWTFGGGTKLEIK
>Light Chain Combinations of SC16.4 IgG histidine scanning
variant #8
(SEQ ID NO: 233)
DIQMTQTTSSLSASLGDRVTISCRASQDHSNHLNWYQQKPDGTVKLLIYYTSRLHSGVPSRFSGS
GSGTDYSLTISNLELEDIATYFCQQGDHLPWTFGGGTKLEIK
>Light Chain Combinations of SC16.4 IgG histidine scanning
variant #9
(SEQ ID NO: 234)
DIQMTQTTSSLSASLGDRVTISCRASQDHSNYLHWYQQKPDGTVKLLIYYTSRLHSGVPSRFSGS
GSGTDYSLTISNLELEDIATYFCQQGDHLPWTFGGGTKLEIK
>Light Chain Combinations of SC16.4 IgG histidine scanning
variant #10
(SEQ ID NO: 235)
DIQMTQTTSSLSASLGDRVTISCRASQDISNHLHWYQQKPDGTVKLLIYYTSRLHSGVPSRFSGSG
SGTDYSLTISNLELEDIATYFCQQGDHLPWTFGGGTKLEIK
>Heavy Chain of hSC16.13 IgG
(SEQ ID NO: 236)
QITLKESGPTLVKPTQTLTLTCTFSGFSLSTSGMGVGWIRQPPGKALEWLAHIWWDDVKRYSPSL
KSRLTITKDTSKNQVVLTMTNMDPVDTATYYCARIVSFDNDVVSAMDYWGQGTLVTVSS
>Light Chain of hSC16.13 IgG
(SEQ ID NO: 237)
DIQMTQSPSSLSASVGDRVTITCSASSSVSYMYWYQQKPGKAPKWYLTSNLASGVPSRFSGSGS
GTDFTLTISSLQPEDFATYYCQQWRSNPFTFGQGTKLEIK
>Heavy Chain of hSC16.13 IgG histidine scanning variant #1
(SEQ ID NO: 238)
QITLKESGPTLVKPTQTLTLTCTFSHFSLSTSGMGVGWIRQPPGKALEWLAHIWWDDVKRYSPSL
KSRLTITKDTSKNQVVLTMTNMDPVDTATYYCARIVSFDNDVVSAMDYWGQGTLVTVSS
>Heavy Chain of hSC16.13 IgG histidine scanning variant #2
(SEQ ID NO: 239)
QITLKESGPTLVKPTQTLTLTCTFSGHSLSTSGMGVGWIRQPPGKALEWLAHIWWDDVKRYSPSL
KSRLTITKDTSKNQVVLTMTNMDPVDTATYYCARIVSFDNDVVSAMDYWGQGTLVTVSS
>Heavy Chain of hSC16.13 IgG histidine scanning variant #3
(SEQ ID NO: 240)
QITLKESGPTLVKPTQTLTLTCTFSGFHLSTSGMGVGWIRQPPGKALEWLAHIWWDDVKRYSPSL
KSRLTITKDTSKNQVVLTMTNMDPVDTATYYCARIVSFDNDVVSAMDYWGQGTLVTVSS
>Heavy Chain of hSC16.13 IgG histidine scanning variant #4
(SEQ ID NO: 241)
QITLKESGPTLVKPTQTLTLTCTFSGFSHSTSGMGVGWIRQPPGKALEWLAHIWWDDVKRYSPSL
KSRLTITKDTSKNQVVLTMTNMDPVDTATYYCARIVSFDNDVVSAMDYWGQGTLVTVSS
>Heavy Chain of hSC16.13 IgG histidine scanning variant #5
(SEQ ID NO: 242)
QITLKESGPTLVKPTQTLTLTCTFSGFSLHTSGMGVGWIRQPPGKALEWLAHIWWDDVKRYSPSL
KSRLTITKDTSKNQVVLTMTNMDPVDTATYYCARIVSFDNDVVSAMDYWGQGTLVTVSS
>Heavy Chain of hSC16.13 IgG histidine scanning variant #6
(SEQ ID NO: 243)
QITLKESGPTLVKPTQTLTLTCTFSGFSLSHSGMGVGWIRQPPGKALEWLAHIWWDDVKRYSPSL
KSRLTITKDTSKNQVVLTMTNMDPVDTATYYCARIVSFDNDVVSAMDYWGQGTLVTVSS
>Heavy Chain of hSC16.13 IgG histidine scanning variant #7
(SEQ ID NO: 244)
QITLKESGPTLVKPTQTLTLTCTFSGFSLSTHGMGVGWIRQPPGKALEWLAHIWWDDVKRYSPSL
KSRLTITKDTSKNQVVLTMTNMDPVDTATYYCARIVSFDNDVVSAMDYWGQGTLVTVSS
>Heavy Chain of hSC16.13 IgG histidine scanning variant #8
(SEQ ID NO: 245)
QITLKESGPTLVKPTQTLTLTCTFSGFSLSTSHMGVGWIRQPPGKALEWLAHIWWDDVKRYSPSL
KSRLTITKDTSKNQVVLTMTNMDPVDTATYYCARIVSFDNDVVSAMDYWGQGTLVTVSS
>Heavy Chain of hSC16.13 IgG histidine scanning variant #9
(SEQ ID NO: 246)
QITLKESGPTLVKPTQTLTLTCTFSGFSLSTSGHGVGWIRQPPGKALEWLAHIWWDDVKRYSPSL
KSRLTITKDTSKNQVVLTMTNMDPVDTATYYCARIVSFDNDVVSAMDYWGQGTLVTVSS
>Heavy Chain of hSC16.13 IgG histidine scanning variant #10
(SEQ ID NO: 247)
QITLKESGPTLVKPTQTLTLTCTFSGFSLSTSGMHVGWIRQPPGKALEWLAHIWWDDVKRYSPSL
KSRLTITKDTSKNQVVLTMTNMDPVDTATYYCARIVSFDNDVVSAMDYWGQGTLVTVSS
>Heavy Chain of hSC16.13 IgG histidine scanning variant #11
(SEQ ID NO: 248)
QITLKESGPTLVKPTQTLTLTCTFSGFSLSTSGMGHGWIRQPPGKALEWLAHIWWDDVKRYSPSL
KSRLTITKDTSKNQVVLTMTNMDPVDTATYYCARIVSFDNDVVSAMDYWGQGTLVTVSS
>Heavy Chain of hSC16.13 IgG histidine scanning variant #12
(SEQ ID NO: 249)
QITLKESGPTLVKPTQTLTLTCTFSGFSLSTSGMGVHWIRQPPGKALEWLAHIWWDDVKRYSPSL
KSRLTITKDTSKNQVVLTMTNMDPVDTATYYCARIVSFDNDVVSAMDYWGQGTLVTVSS
>Heavy Chain of hSC16.13 IgG histidine scanning variant #13
(SEQ ID NO: 250)
QITLKESGPTLVKPTQTLTLTCTFSGFSLSTSGMGVGWIRQPPGKALEWLAAIWWDDVKRYSPSL
KSRLTITKDTSKNQVVLTMTNMDPVDTATYYCARIVSFDNDVVSAMDYWGQGTLVTVSS
>Heavy Chain of hSC16.13 IgG histidine scanning variant #14
(SEQ ID NO: 251)
QITLKESGPTLVKPTQTLTLTCTFSGFSLSTSGMGVGWIRQPPGKALEWLAHHWWDDVKRYSPS
LKSRLTITKDTSKNQVVLTMTNMDPVDTATYYCARIVSFDNDVVSAMDYWGQGTLVTVSS
>Heavy Chain of hSC16.13 IgG histidine scanning variant #15
(SEQ ID NO: 252)
QITLKESGPTLVKPTQTLTLTCTFSGFSLSTSGMGVGWIRQPPGKALEWLAHIHWDDVKRYSPSL
KSRLTITKDTSKNQVVLTMTNMDPVDTATYYCARIVSFDNDVVSAMDYWGQGTLVTVSS
>Heavy Chain of hSC16.13 IgG histidine scanning variant #16
(SEQ ID NO: 253)
QITLKESGPTLVKPTQTLTLTCTFSGFSLSTSGMGVGWIRQPPGKALEWLAHIWHDDVKRYSPSL
KSRLTITKDTSKNQVVLTMTNMDPVDTATYYCARIVSFDNDVVSAMDYWGQGTLVTVSS
>Heavy Chain of hSC16.13 IgG histidine scanning variant #17
(SEQ ID NO: 254)
QITLKESGPTLVKPTQTLTLTCTFSGFSLSTSGMGVGWIRQPPGKALEWLAHIWWHDVKRYSPSL
KSRLTITKDTSKNQVVLTMTNMDPVDTATYYCARIVSFDNDVVSAMDYWGQGTLVTVSS
>Heavy Chain of hSC16.13 IgG histidine scanning variant #18
(SEQ ID NO: 255)
QITLKESGPTLVKPTQTLTLTCTFSGFSLSTSGMGVGWIRQPPGKALEWLAHIWWDHVKRYSPSL
KSRLTITKDTSKNQVVLTMTNMDPVDTATYYCARIVSFDNDVVSAMDYWGQGTLVTVSS
>Heavy Chain of hSC16.13 IgG histidine scanning variant #19
(SEQ ID NO: 256)
QITLKESGPTLVKPTQTLTLTCTFSGFSLSTSGMGVGWIRQPPGKALEWLAHIWWDDHKRYSPSL
KSRLTITKDTSKNQVVLTMTNMDPVDTATYYCARIVSFDNDVVSAMDYWGQGTLVTVSS
>Heavy Chain of hSC16.13 IgG histidine scanning variant #20
(SEQ ID NO: 257)
QITLKESGPTLVKPTQTLTLTCTFSGFSLSTSGMGVGWIRQPPGKALEWLAHIWWDDVHRYSPSL
KSRLTITKDTSKNQVVLTMTNMDPVDTATYYCARIVSFDNDVVSAMDYWGQGTLVTVSS
>Heavy Chain of hSC16.13 IgG histidine scanning variant #21
(SEQ ID NO: 258)
QITLKESGPTLVKPTQTLTLTCTFSGFSLSTSGMGVGWIRQPPGKALEWLAHIWWDDVKHYSPSL
KSRLTITKDTSKNQVVLTMTNMDPVDTATYYCARIVSFDNDVVSAMDYWGQGTLVTVSS
>Heavy Chain of hSC16.13 IgG histidine scanning variant #22
(SEQ ID NO: 259)
QITLKESGPTLVKPTQTLTLTCTFSGFSLSTSGMGVGWIRQPPGKALEWLAHIWWDDVKRHSPSL
KSRLTITKDTSKNQVVLTMTNMDPVDTATYYCARIVSFDNDVVSAMDYWGQGTLVTVSS
>Heavy Chain of hSC16.13 IgG histidine scanning variant #23
(SEQ ID NO: 260)
QITLKESGPTLVKPTQTLTLTCTFSGFSLSTSGMGVGWIRQPPGKALEWLAHIWWDDVKRYHPSL
KSRLTITKDTSKNQVVLTMTNMDPVDTATYYCARIVSFDNDVVSAMDYWGQGTLVTVSS
>Heavy Chain of hSC16.13 IgG histidine scanning variant #24
(SEQ ID NO: 261)
QITLKESGPTLVKPTQTLTLTCTFSGFSLSTSGMGVGWIRQPPGKALEWLAHIWWDDVKRYSHSL
KSRLTITKDTSKNQVVLTMTNMDPVDTATYYCARIVSFDNDVVSAMDYWGQGTLVTVSS
>Heavy Chain of hSC16.13 IgG histidine scanning variant #25
(SEQ ID NO: 262)
QITLKESGPTLVKPTQTLTLTCTFSGFSLSTSGMGVGWIRQPPGKALEWLAHIWWDDVKRYSPHL
KSRLTITKDTSKNQVVLTMTNMDPVDTATYYCARIVSFDNDVVSAMDYWGQGTLVTVSS
>Heavy Chain of hSC16.13 IgG histidine scanning variant #26
(SEQ ID NO: 263)
QITLKESGPTLVKPTQTLTLTCTFSGFSLSTSGMGVGWIRQPPGKALEWLAHIWWDDVKRYSPSH
KSRLTITKDTSKNQVVLTMTNMDPVDTATYYCARIVSFDNDVVSAMDYWGQGTLVTVSS
>Heavy Chain of hSC16.13 IgG histidine scanning variant #27
(SEQ ID NO: 264)
QITLKESGPTLVKPTQTLTLTCTFSGFSLSTSGMGVGWIRQPPGKALEWLAHIWWDDVKRYSPSL
HSRLTITKDTSKNQVVLTMTNMDPVDTATYYCARIVSFDNDVVSAMDYWGQGTLVTVSS
>Heavy Chain of hSC16.13 IgG histidine scanning variant #28
(SEQ ID NO: 265)
QITLKESGPTLVKPTQTLTLTCTFSGFSLSTSGMGVGWIRQPPGKALEWLAHIWWDDVKRYSPSL
KHRLTITKDTSKNQVVLTMTNMDPVDTATYYCARIVSFDNDVVSAMDYWGQGTLVTVSS
>Heavy Chain of hSC16.13 IgG histidine scanning variant #29
(SEQ ID NO: 266)
QITLKESGPTLVKPTQTLTLTCTFSGFSLSTSGMGVGWIRQPPGKALEWLAHIWWDDVKRYSPSL
KSRLTITKDTSKNQVVLTMTNMDPVDTATYYCHRIVSFDNDVVSAMDYWGQGTLVTVSS
>Heavy Chain of hSC16.13 IgG histidine scanning variant #30
(SEQ ID NO: 267)
QITLKESGPTLVKPTQTLTLTCTFSGFSLSTSGMGVGWIRQPPGKALEWLAHIWWDDVKRYSPSL
KSRLTITKDTSKNQVVLTMTNMDPVDTATYYCAHIVSFDNDVVSAMDYWGQGTLVTVSS
>Heavy Chain of hSC16.13 IgG histidine scanning variant #31
(SEQ ID NO: 268)
QITLKESGPTLVKPTQTLTLTCTFSGFSLSTSGMGVGWIRQPPGKALEWLAHIWWDDVKRYSPSL
KSRLTITKDTSKNQVVLTMTNMDPVDTATYYCARHVSFDNDVVSAMDYWGQGTLVTVSS
>Heavy Chain of hSC16.13 IgG histidine scanning variant #32
(SEQ ID NO: 269)
QITLKESGPTLVKPTQTLTLTCTFSGFSLSTSGMGVGWIRQPPGKALEWLAHIWWDDVKRYSPSL
KSRLTITKDTSKNQVVLTMTNMDPVDTATYYCARIHSFDNDVVSAMDYWGQGTLVTVSS
>Heavy Chain of hSC16.13 IgG histidine scanning variant #33
(SEQ ID NO: 270)
QITLKESGPTLVKPTQTLTLTCTFSGFSLSTSGMGVGWIRQPPGKALEWLAHIWWDDVKRYSPSL
KSRLTITKDTSKNQVVLTMTNMDPVDTATYYCARIVHFDNDVVSAMDYWGQGTLVTVSS
>Heavy Chain of hSC16.13 IgG histidine scanning variant #34
(SEQ ID NO: 271)
QITLKESGPTLVKPTQTLTLTCTFSGFSLSTSGMGVGWIRQPPGKALEWLAHIWWDDVKRYSPSL
KSRLTITKDTSKNQVVLTMTNMDPVDTATYYCARIVSHDNDVVSAMDYWGQGTLVTVSS
>Heavy Chain of hSC16.13 IgG histidine scanning variant #35
(SEQ ID NO: 272)
QITLKESGPTLVKPTQTLTLTCTFSGFSLSTSGMGVGWIRQPPGKALEWLAHIWWDDVKRYSPSL
KSRLTITKDTSKNQVVLTMTNMDPVDTATYYCARIVSFHNDVVSAMDYWGQGTLVTVSS
>Heavy Chain of hSC16.13 IgG histidine scanning variant #36
(SEQ ID NO: 273)
QITLKESGPTLVKPTQTLTLTCTFSGFSLSTSGMGVGWIRQPPGKALEWLAHIWWDDVKRYSPSL
KSRLTITKDTSKNQVVLTMTNMDPVDTATYYCARIVSFDHDVVSAMDYWGQGTLVTVSS
>Heavy Chain of hSC16.13 IgG histidine scanning variant #37
(SEQ ID NO: 274)
QITLKESGPTLVKPTQTLTLTCTFSGFSLSTSGMGVGWIRQPPGKALEWLAHIWWDDVKRYSPSL
KSRLTITKDTSKNQVVLTMTNMDPVDTATYYCARIVSFDNHVVSAMDYWGQGTLVTVSS
>Heavy Chain of hSC16.13 IgG histidine scanning variant #38
(SEQ ID NO: 275)
QITLKESGPTLVKPTQTLTLTCTFSGFSLSTSGMGVGWIRQPPGKALEWLAHIWWDDVKRYSPSL
KSRLTITKDTSKNQVVLTMTNMDPVDTATYYCARIVSFDNDHVSAMDYWGQGTLVTVSS
>Heavy Chain of hSC16.13 IgG histidine scanning variant #39
(SEQ ID NO: 276)
QITLKESGPTLVKPTQTLTLTCTFSGFSLSTSGMGVGWIRQPPGKALEWLAHIWWDDVKRYSPSL
KSRLTITKDTSKNQVVLTMTNMDPVDTATYYCARIVSFDNDVHSAMDYWGQGTLVTVSS
>Heavy Chain of hSC16.13 IgG histidine scanning variant #40
(SEQ ID NO: 277)
QITLKESGPTLVKPTQTLTLTCTFSGFSLSTSGMGVGWIRQPPGKALEWLAHIWWDDVKRYSPSL
KSRLTITKDTSKNQVVLTMTNMDPVDTATYYCARIVSFDNDVVHAMDYWGQGTLVTVSS
>Heavy Chain of hSC16.13 IgG histidine scanning variant #41
(SEQ ID NO: 278)
QITLKESGPTLVKPTQTLTLTCTFSGFSLSTSGMGVGWIRQPPGKALEWLAHIWWDDVKRYSPSL
KSRLTITKDTSKNQVVLTMTNMDPVDTATYYCARIVSFDNDVVSHMDYWGQGTLVTVSS
>Heavy Chain of hSC16.13 IgG histidine scanning variant #42
(SEQ ID NO: 279)
QITLKESGPTLVKPTQTLTLTCTFSGFSLSTSGMGVGWIRQPPGKALEWLAHIWWDDVKRYSPSL
KSRLTITKDTSKNQVVLTMTNMDPVDTATYYCARIVSFDNDVVSAHDYWGQGTLVTVSS
>Heavy Chain of hSC16.13 IgG histidine scanning variant #43
(SEQ ID NO: 280)
QITLKESGPTLVKPTQTLTLTCTFSGFSLSTSGMGVGWIRQPPGKALEWLAHIWWDDVKRYSPSL
KSRLTITKDTSKNQVVLTMTNMDPVDTATYYCARIVSFDNDVVSAMHYWGQGTLVTVSS
>Heavy Chain of hSC16.13 IgG histidine scanning variant #44
(SEQ ID NO: 281)
QITLKESGPTLVKPTQTLTLTCTFSGFSLSTSGMGVGWIRQPPGKALEWLAHIWWDDVKRYSPSL
KSRLTITKDTSKNQVVLTMTNMDPVDTATYYCARIVSFDNDVVSAMDHWGQGTLVTVSS
>Light Chain of hSC16.13 IgG histidine scanning variant #1
(SEQ ID NO: 282)
DIQMTQSPSSLSASVGDRVTITCHASSSVSYMYWYQQKPGKAPKWYLTSNLASGVPSRFSGSG
SGTDFTLTISSLQPEDFATYYCQQWRSNPFTFGQGTKLEIK
>Light Chain of hSC16.13 IgG histidine scanning variant #2
(SEQ ID NO: 283)
DIQMTQSPSSLSASVGDRVTITCSHSSSVSYMYWYQQKPGKAPKLLIYLTSNLASGVPSRFSGSGS
GTDFTLTISSLQPEDFATYYCQQWRSNPFTFGQGTKLEIK
>Light Chain of hSC16.13 IgG histidine scanning variant #3
(SEQ ID NO: 284)
DIQMTQSPSSLSASVGDRVTITCSAHSSVSYMYWYQQKPGKAPKLLIYLTSNLASGVPSRFSGSG
SGTDFTLTISSLQPEDFATYYCQQWRSNPFTFGQGTKLEIK
>Light Chain of hSC16.13 IgG histidine scanning variant #4
(SEQ ID NO: 285)
DIQMTQSPSSLSASVGDRVTITCSASHSVSYMYWYQQKPGKAPKLLIYLTSNLASGVPSRFSGSG
SGTDFTLTISSLQPEDFATYYCQQWRSNPFTFGQGTKLEIK
>Light Chain of hSC16.13 IgG histidine scanning variant #5
(SEQ ID NO: 286)
DIQMTQSPSSLSASVGDRVTITCSASSHVSYMYWYQQKPGKAPKLLIYLTSNLASGVPSRFSGSG
SGTDFTLTISSLQPEDFATYYCQQWRSNPFTFGQGTKLEIK
>Light Chain of hSC16.13 IgG histidine scanning variant #6
(SEQ ID NO: 287)
DIQMTQSPSSLSASVGDRVTITCSASSSHSYMYWYQQKPGKAPKLLIYLTSNLASGVPSRFSGSGS
GTDFTLTISSLQPEDFATYYCQQWRSNPFTFGQGTKLEIK
>Light Chain of hSC16.13 IgG histidine scanning variant #7
(SEQ ID NO: 288)
DIQMTQSPSSLSASVGDRVTITCSASSSVHYMYWYQQKPGKAPKLLIYLTSNLASGVPSRFSGSG
SGTDFTLTISSLQPEDFATYYCQQWRSNPFTFGQGTKLEIK
>Light Chain of hSC16.13 IgG histidine scanning variant #8
(SEQ ID NO: 289)
DIQMTQSPSSLSASVGDRVTITCSASSSVSHMYWYQQKPGKAPKLLIYLTSNLASGVPSRFSGSGS
GTDFTLTISSLQPEDFATYYCQQWRSNPFTFGQGTKLEIK
>Light Chain of hSC16.13 IgG histidine scanning variant #9
(SEQ ID NO: 290)
DIQMTQSPSSLSASVGDRVTITCSASSSVSYHYWYQQKPGKAPKLLIYLTSNLASGVPSRFSGSGS
GTDFTLTISSLQPEDFATYYCQQWRSNPFTFGQGTKLEIK
>Light Chain of hSC16.13 IgG histidine scanning variant #10
(SEQ ID NO: 291)
DIQMTQSPSSLSASVGDRVTITCSASSSVSYMHWYQQKPGKAPKLLIYLTSNLASGVPSRFSGSGS
GTDFTLTISSLQPEDFATYYCQQWRSNPFTFGQGTKLEIK
>Light Chain of hSC16.13 IgG histidine scanning variant #11
(SEQ ID NO: 292)
DIQMTQSPSSLSASVGDRVTITCSASSSVSYMYWYQQKPGKAPKLLIYHTSNLASGVPSRFSGSGS
GTDFTLTISSLQPEDFATYYCQQWRSNPFTFGQGTKLEIK
>Light Chain of hSC16.13 IgG histidine scanning variant #12
(SEQ ID NO: 293)
DIQMTQSPSSLSASVGDRVTITCSASSSVSYMYWYQQKPGKAPKWYLHSNLASGVPSRFSGSGS
GTDFTLTISSLQPEDFATYYCQQWRSNPFTFGQGTKLEIK
>Light Chain of hSC16.13 IgG histidine scanning variant #13
(SEQ ID NO: 294)
DIQMTQSPSSLSASVGDRVTITCSASSSVSYMYWYQQKPGKAPKWYLTHNLASGVPSRFSGSG
SGTDFTLTISSLQPEDFATYYCQQWRSNPFTFGQGTKLEIK
>Light Chain of hSC16.13 IgG histidine scanning variant #14
(SEQ ID NO: 295)
DIQMTQSPSSLSASVGDRVTITCSASSSVSYMYWYQQKPGKAPKWYLTSHLASGVPSRFSGSGS
GTDFTLTISSLQPEDFATYYCQQWRSNPFTFGQGTKLEIK
>Light Chain of hSC16.13 IgG histidine scanning variant #15
(SEQ ID NO: 296)
DIQMTQSPSSLSASVGDRVTITCSASSSVSYMYWYQQKPGKAPKWYLTSNHASGVPSRFSGSGS
GTDFTLTISSLQPEDFATYYCQQWRSNPFTFGQGTKLEIK
>Light Chain of hSC16.13 IgG histidine scanning variant #16
(SEQ ID NO: 297)
DIQMTQSPSSLSASVGDRVTITCSASSSVSYMYWYQQKPGKAPKWYLTSNLHSGVPSRFSGSGS
GTDFTLTISSLQPEDFATYYCQQWRSNPFTFGQGTKLEIK
>Light Chain of hSC16.13 IgG histidine scanning variant #17
(SEQ ID NO: 298)
DIQMTQSPSSLSASVGDRVTITCSASSSVSYMYWYQQKPGKAPKLLIYLTSNLAHGVPSRFSGSG
SGTDFTLTISSLQPEDFATYYCQQWRSNPFTFGQGTKLEIK
>Light Chain of hSC16.13 IgG histidine scanning variant #18
(SEQ ID NO: 299)
DIQMTQSPSSLSASVGDRVTITCSASSSVSYMYWYQQKPGKAPKWYLTSNLASGVPSRFSGSGS
GTDFTLTISSLQPEDFATYYCHQWRSNPFTFGQGTKLEIK
>Light Chain of hSC16.13 IgG histidine scanning variant #19
(SEQ ID NO: 300)
DIQMTQSPSSLSASVGDRVTITCSASSSVSYMYWYQQKPGKAPKWYLTSNLASGVPSRFSGSGS
GTDFTLTISSLQPEDFATYYCQHWRSNPFTFGQGTKLEIK
>Light Chain of hSC16.13 IgG histidine scanning variant #20
(SEQ ID NO: 301)
DIQMTQSPSSLSASVGDRVTITCSASSSVSYMYWYQQKPGKAPKLLIYLTSNLASGVPSRFSGSGS
GTDFTLTISSLQPEDFATYYCQQHRSNPFTFGQGTKLEIK
>Light Chain of hSC16.13 IgG histidine scanning variant #21
(SEQ ID NO: 302)
DIQMTQSPSSLSASVGDRVTITCSASSSVSYMYWYQQKPGKAPKLLIYLTSNLASGVPSRFSGSGS
GTDFTLTISSLQPEDFATYYCQQWHSNPFTFGQGTKLEIK
>Light Chain of hSC16.13 IgG histidine scanning variant #22
(SEQ ID NO: 303)
DIQMTQSPSSLSASVGDRVTITCSASSSVSYMYWYQQKPGKAPKLLIYLTSNLASGVPSRFSGSGS
GTDFTLTISSLQPEDFATYYCQQWRHNPFTFGQGTKLEIK
>Light Chain of hSC16.13 IgG histidine scanning variant #23
(SEQ ID NO: 304)
DIQMTQSPSSLSASVGDRVTITCSASSSVSYMYWYQQKPGKAPKLLIYLTSNLASGVPSRFSGSGS
GTDFTLTISSLQPEDFATYYCQQWRSHPFTFGQGTKLEIK
>Light Chain of hSC16.13 IgG histidine scanning variant #24
(SEQ ID NO: 305)
DIQMTQSPSSLSASVGDRVTITCSASSSVSYMYWYQQKPGKAPKLLIYLTSNLASGVPSRFSGSGS
GTDFTLTISSLQPEDFATYYCQQWRSNHFTFGQGTKLEIK
>Light Chain of hSC16.13 IgG histidine scanning variant #25
(SEQ ID NO: 306)
DIQMTQSPSSLSASVGDRVTITCSASSSVSYMYWYQQKPGKAPKLLIYLTSNLASGVPSRFSGSGS
GTDFTLTISSLQPEDFATYYCQQWRSNPHTFGQGTKLEIK
>Light Chain of hSC16.13 IgG histidine scanning variant #26
(SEQ ID NO: 307)
DIQMTQSPSSLSASVGDRVTITCSASSSVSYMYWYQQKPGKAPKLLIYLTSNLASGVPSRFSGSGS
GTDFTLTISSLQPEDFATYYCQQWRSNPFHFGQGTKLEIK
>Heavy Chain Combinations of hSC16.13 IgG histidine scanning
variant #1
(SEQ ID NO: 308)
QITLKESGPTLVKPTQTLTLTCTFSGHSLSTSGMGVGWIRQPPGKALEWLAAIWWDDVKRYSPSL
KSRLTITKDTSKNQVVLTMTNMDPVDTATYYCARIVSFDNDVVSAMDYWGQGTLVTVSS
>Heavy Chain Combinations of hSC16.13 IgG histidine scanning
variant #2
(SEQ ID NO: 309)
QITLKESGPTLVKPTQTLTLTCTFSGHSLSTSGMGVGWIRQPPGKALEWLAHIWHDDVKRYSPSL
KSRLTITKDTSKNQVVLTMTNMDPVDTATYYCARIVSFDNDVVSAMDYWGQGTLVTVSS
>Heavy Chain Combinations of hSC16.13 IgG histidine scanning
variant #3
(SEQ ID NO: 310)
QITLKESGPTLVKPTQTLTLTCTFSGHSLSTSGMGVGWIRQPPGKALEWLAHIWWDDVKRYSPSL
KSRLTITKDTSKNQVVLTMTNMDPVDTATYYCARIVHFDNDVVSAMDYWGQGTLVTVSS
>Heavy Chain Combinations of hSC16.13 IgG histidine scanning
variant #4
(SEQ ID NO: 311)
QITLKESGPTLVKPTQTLTLTCTFSGHSLSTSGMGVGWIRQPPGKALEWLAHIWWDDVKRYSPSL
KSRLTITKDTSKNQVVLTMTNMDPVDTATYYCARIVSFDNHVVSAMDYWGQGTLVTVSS
>Heavy Chain Combinations of hSC16.13 IgG histidine scanning
variant #5
(SEQ ID NO: 312)
QITLKESGPTLVKPTQTLTLTCTFSGFSLSTSGMGVGWIRQPPGKALEWLAAIWHDDVKRYSPSL
KSRLTITKDTSKNQVVLTMTNMDPVDTATYYCARIVSFDNDVVSAMDYWGQGTLVTVSS
>Heavy Chain Combinations of hSC16.13 IgG histidine scanning
variant #6
(SEQ ID NO: 313)
QITLKESGPTLVKPTQTLTLTCTFSGFSLSTSGMGVGWIRQPPGKALEWLAAIWWDDVKRYSPSL
KSRLTITKDTSKNQVVLTMTNMDPVDTATYYCARIVHFDNDVVSAMDYWGQGTLVTVSS
>Heavy Chain Combinations of hSC16.13 IgG histidine scanning
variant #7
(SEQ ID NO: 314)
QITLKESGPTLVKPTQTLTLTCTFSGFSLSTSGMGVGWIRQPPGKALEWLAAIWWDDVKRYSPSL
KSRLTITKDTSKNQVVLTMTNMDPVDTATYYCARIVSFDNHVVSAMDYWGQGTLVTVSS
>Heavy Chain Combinations of hSC16.13 IgG histidine scanning
variant #8
(SEQ ID NO: 315)
QITLKESGPTLVKPTQTLTLTCTFSGFSLSTSGMGVGWIRQPPGKALEWLAHIWHDDVKRYSPSL
KSRLTITKDTSKNQVVLTMTNMDPVDTATYYCARIVHFDNDVVSAMDYWGQGTLVTVSS
>Heavy Chain Combinations of hSC16.13 IgG histidine scanning
variant #9
(SEQ ID NO: 316)
QITLKESGPTLVKPTQTLTLTCTFSGFSLSTSGMGVGWIRQPPGKALEWLAHIWHDDVKRYSPSL
KSRLTITKDTSKNQVVLTMTNMDPVDTATYYCARIVSFDNHVVSAMDYWGQGTLVTVSS
>Heavy Chain Combinations of hSC16.13 IgG histidine scanning
variant #10
(SEQ ID NO: 317)
QITLKESGPTLVKPTQTLTLTCTFSGFSLSTSGMGVGWIRQPPGKALEWLAHIWWDDVKRYSPSL
KSRLTITKDTSKNQVVLTMTNMDPVDTATYYCARIVHFDNHVVSAMDYWGQGTLVTVSS
>Heavy Chain Combinations of hSC16.13 IgG histidine scanning
variant #11
(SEQ ID NO: 318)
QITLKESGPTLVKPTQTLTLTCTFSGHSLSTSGMGVGWIRQPPGKALEWLAAIWHDDVKRYSPSL
KSRLTITKDTSKNQVVLTMTNMDPVDTATYYCARIVSFDNDVVSAMDYWGQGTLVTVSS
>Heavy Chain Combinations of hSC16.13 IgG histidine scanning
variant #12
(SEQ ID NO: 319)
QITLKESGPTLVKPTQTLTLTCTFSGHSLSTSGMGVGWIRQPPGKALEWLAAIWWDDVKRYSPSL
KSRLTITKDTSKNQVVLTMTNMDPVDTATYYCARIVHFDNDVVSAMDYWGQGTLVTVSS
>Heavy Chain Combinations of hSC16.13 IgG histidine scanning
variant #13
(SEQ ID NO: 320)
QITLKESGPTLVKPTQTLTLTCTFSGHSLSTSGMGVGWIRQPPGKALEWLAAIWWDDVKRYSPSL
KSRLTITKDTSKNQVVLTMTNMDPVDTATYYCARIVSFDNHVVSAMDYWGQGTLVTVSS
>Heavy Chain Combinations of hSC16.13 IgG histidine scanning
variant #14
(SEQ ID NO: 321)
QITLKESGPTLVKPTQTLTLTCTFSGHSLSTSGMGVGWIRQPPGKALEWLAHIWHDDVKRYSPSL
KSRLTITKDTSKNQVVLTMTNMDPVDTATYYCARIVHFDNDVVSAMDYWGQGTLVTVSS
>Heavy Chain Combinations of hSC16.13 IgG histidine scanning
variant #15
(SEQ ID NO: 322)
QITLKESGPTLVKPTQTLTLTCTFSGHSLSTSGMGVGWIRQPPGKALEWLAHIWHDDVKRYSPSL
KSRLTITKDTSKNQVVLTMTNMDPVDTATYYCARIVSFDNHVVSAMDYWGQGTLVTVSS
>Heavy Chain Combinations of hSC16.13 IgG histidine scanning
variant #16
(SEQ ID NO: 323)
QITLKESGPTLVKPTQTLTLTCTFSGHSLSTSGMGVGWIRQPPGKALEWLAHIWWDDVKRYSPSL
KSRLTITKDTSKNQVVLTMTNMDPVDTATYYCARIVHFDNHVVSAMDYWGQGTLVTVSS
>Heavy Chain Combinations of hSC16.13 IgG histidine scanning
variant #17
(SEQ ID NO: 324)
QITLKESGPTLVKPTQTLTLTCTFSGFSLSTSGMGVGWIRQPPGKALEWLAAIWHDDVKRYSPSL
KSRLTITKDTSKNQVVLTMTNMDPVDTATYYCARIVHFDNDVVSAMDYWGQGTLVTVSS
>Heavy Chain Combinations of hSC16.13 IgG histidine scanning
variant #18
(SEQ ID NO: 325)
QITLKESGPTLVKPTQTLTLTCTFSGFSLSTSGMGVGWIRQPPGKALEWLAAIWHDDVKRYSPSL
KSRLTITKDTSKNQVVLTMTNMDPVDTATYYCARIVSFDNHVVSAMDYWGQGTLVTVSS
>Heavy Chain Combinations of hSC16.13 IgG histidine scanning
variant #19
(SEQ ID NO: 326)
QITLKESGPTLVKPTQTLTLTCTFSGFSLSTSGMGVGWIRQPPGKALEWLAAIWWDDVKRYSPSL
KSRLTITKDTSKNQVVLTMTNMDPVDTATYYCARIVHFDNHVVSAMDYWGQGTLVTVSS
>Heavy Chain Combinations of hSC16.13 IgG histidine scanning
variant #20
(SEQ ID NO: 327)
QITLKESGPTLVKPTQTLTLTCTFSGFSLSTSGMGVGWIRQPPGKALEWLAHIWHDDVKRYSPSL
KSRLTITKDTSKNQVVLTMTNMDPVDTATYYCARIVHFDNHVVSAMDYWGQGTLVTVSS
>Heavy Chain Combinations of hSC16.13 IgG histidine scanning
variant #21
(SEQ ID NO: 328)
QITLKESGPTLVKPTQTLTLTCTFSGHSLSTSGMGVGWIRQPPGKALEWLAAIWHDDVKRYSPSL
KSRLTITKDTSKNQVVLTMTNMDPVDTATYYCARIVHFDNDVVSAMDYWGQGTLVTVSS
>Heavy Chain Combinations of hSC16.13 IgG histidine scanning
variant #22
(SEQ ID NO: 329)
QITLKESGPTLVKPTQTLTLTCTFSGHSLSTSGMGVGWIRQPPGKALEWLAAIWHDDVKRYSPSL
KSRLTITKDTSKNQVVLTMTNMDPVDTATYYCARIVSFDNHVVSAMDYWGQGTLVTVSS
>Heavy Chain Combinations of hSC16.13 IgG histidine scanning
variant #23
(SEQ ID NO: 330)
QITLKESGPTLVKPTQTLTLTCTFSGHSLSTSGMGVGWIRQPPGKALEWLAAIWWDDVKRYSPSL
KSRLTITKDTSKNQVVLTMTNMDPVDTATYYCARIVHFDNHVVSAMDYWGQGTLVTVSS
>Heavy Chain Combinations of hSC16.13 IgG histidine scanning
variant #24
(SEQ ID NO: 331)
QITLKESGPTLVKPTQTLTLTCTFSGHSLSTSGMGVGWIRQPPGKALEWLAHIWHDDVKRYSPSL
KSRLTITKDTSKNQVVLTMTNMDPVDTATYYCARIVHFDNHVVSAMDYWGQGTLVTVSS
>Heavy Chain Combinations of hSC16.13 IgG histidine scanning
variant #25
(SEQ ID NO: 332)
QITLKESGPTLVKPTQTLTLTCTFSGFSLSTSGMGVGWIRQPPGKALEWLAAIWHDDVKRYSPSL
KSRLTITKDTSKNQVVLTMTNMDPVDTATYYCARIVHFDNHVVSAMDYWGQGTLVTVSS
>Heavy Chain Combinations of hSC16.13 IgG histidine scanning
variant #26
(SEQ ID NO: 333)
QITLKESGPTLVKPTQTLTLTCTFSGHSLSTSGMGVGWIRQPPGKALEWLAAIWHDDVKRYSPSL
KSRLTITKDTSKNQVVLTMTNMDPVDTATYYCARIVHFDNHVVSAMDYWGQGTLVTVSS
>Light Chain Combinations of SC16.4 IgG histidine scanning
variant #1
(SEQ ID NO: 334)
DIQMTQSPSSLSASVGDRVTITCSASSSVSYMHWYQQKPGKAPKLLIYHTSNLASGVPSRFSGSGS
GTDFTLTISSLQPEDFATYYCQQWRSNPFTFGQGTKLEIK
>Heavy Chain of hSC16.15 IgG
(SEQ ID NO: 335)
QVQLVQSGAEVKKPGASVKVSCKASGYTFTRYWIHWIRQAPGQGLEWMGYINPTTVYTEFNQN
FKDRVTMTRDTSTSTVYMELSSLRSEDTAVYYCARGGSNFFDYWGQGTTVTVSS
>Light Chain of hSC16.15 IgG
(SEQ ID NO: 336)
AIQLTQSPSSLSASVGDRVTITCRASENIYYNLAWYQQKPGKAPKWYTANSLEDGVPSRFSGSG
SGTDFTLTISSLQPEDFATYFCKQAYDVPPTFGGGTKLEIK
>Heavy Chain of hSC16.15 IgG histidine scanning variant #1
(SEQ ID NO: 337)
QVQLVQSGAEVKKPGASVKVSCHASGYTFTRYWIHWIRQAPGQGLEWMGYINPTTVYTEFNQN
FKDRVTMTRDTSTSTVYMELSSLRSEDTAVYYCARGGSNFFDYWGQGTTVTVSS
>Heavy Chain of hSC16.15 IgG histidine scanning variant #2
(SEQ ID NO: 338)
QVQLVQSGAEVKKPGASVKVSCKHSGYTFTRYWIHWIRQAPGQGLEWMGYINPTTVYTEFNQN
FKDRVTMTRDTSTSTVYMELSSLRSEDTAVYYCARGGSNFFDYWGQGTTVTVSS
>Heavy Chain of hSC16.15 IgG histidine scanning variant #3
(SEQ ID NO: 339)
QVQLVQSGAEVKKPGASVKVSCKAHGYTFTRYWIHWIRQAPGQGLEWMGYINPTTVYTEFNQ
NFKDRVTMTRDTSTSTVYMELSSLRSEDTAVYYCARGGSNFFDYWGQGTTVTVSS
>Heavy Chain of hSC16.15 IgG histidine scanning variant #4
(SEQ ID NO: 340)
QVQLVQSGAEVKKPGASVKVSCKASHYTFTRYWIHWIRQAPGQGLEWMGYINPTTVYTEFNQN
FKDRVTMTRDTSTSTVYMELSSLRSEDTAVYYCARGGSNFFDYWGQGTTVTVSS
>Heavy Chain of hSC16.15 IgG histidine scanning variant #5
(SEQ ID NO: 341)
QVQLVQSGAEVKKPGASVKVSCKASGHTFTRYWIHWIRQAPGQGLEWMGYINPTTVYTEFNQN
FKDRVTMTRDTSTSTVYMELSSLRSEDTAVYYCARGGSNFFDYWGQGTTVTVSS
>Heavy Chain of hSC16.15 IgG histidine scanning variant #6
(SEQ ID NO: 342)
QVQLVQSGAEVKKPGASVKVSCKASGYHFTRYWIHWIRQAPGQGLEWMGYINPTTVYTEFNQN
FKDRVTMTRDTSTSTVYMELSSLRSEDTAVYYCARGGSNFFDYWGQGTTVTVSS
>Heavy Chain of hSC16.15 IgG histidine scanning variant #7
(SEQ ID NO: 343)
QVQLVQSGAEVKKPGASVKVSCKASGYTHTRYWIHWIRQAPGQGLEWMGYINPTTVYTEFNQ
NFKDRVTMTRDTSTSTVYMELSSLRSEDTAVYYCARGGSNFFDYWGQGTTVTVSS
>Heavy Chain of hSC16.15 IgG histidine scanning variant #8
(SEQ ID NO: 344)
QVQLVQSGAEVKKPGASVKVSCKASGYTFHRYWIHWIRQAPGQGLEWMGYINPTTVYTEFNQN
FKDRVTMTRDTSTSTVYMELSSLRSEDTAVYYCARGGSNFFDYWGQGTTVTVSS
>Heavy Chain of hSC16.15 IgG histidine scanning variant #9
(SEQ ID NO: 345)
QVQLVQSGAEVKKPGASVKVSCKASGYTFTHYWIHWIRQAPGQGLEWMGYINPTTVYTEFNQN
FKDRVTMTRDTSTSTVYMELSSLRSEDTAVYYCARGGSNFFDYWGQGTTVTVSS
>Heavy Chain of hSC16.15 IgG histidine scanning variant #10
(SEQ ID NO: 346)
QVQLVQSGAEVKKPGASVKVSCKASGYTFTRHWIHWIRQAPGQGLEWMGYINPTTVYTEFNQN
FKDRVTMTRDTSTSTVYMELSSLRSEDTAVYYCARGGSNFFDYWGQGTTVTVSS
>Heavy Chain of hSC16.15 IgG histidine scanning variant #11
(SEQ ID NO: 347)
QVQLVQSGAEVKKPGASVKVSCKASGYTFTRYHIHWIRQAPGQGLEWMGYINPTTVYTEFNQN
FKDRVTMTRDTSTSTVYMELSSLRSEDTAVYYCARGGSNFFDYWGQGTTVTVSS
>Heavy Chain of hSC16.15 IgG histidine scanning variant #12
(SEQ ID NO: 348)
QVQLVQSGAEVKKPGASVKVSCKASGYTFTRYWHHWIRQAPGQGLEWMGYINPTTVYTEFNQ
NFKDRVTMTRDTSTSTVYMELSSLRSEDTAVYYCARGGSNFFDYWGQGTTVTVSS
>Heavy Chain of hSC16.15 IgG histidine scanning variant #13
(SEQ ID NO: 349)
QVQLVQSGAEVKKPGASVKVSCKASGYTFTRYWIAWIRQAPGQGLEWMGYINPTTVYTEFNQN
FKDRVTMTRDTSTSTVYMELSSLRSEDTAVYYCARGGSNFFDYWGQGTTVTVSS
>Heavy Chain of hSC16.15 IgG histidine scanning variant #14
(SEQ ID NO: 350)
QVQLVQSGAEVKKPGASVKVSCKASGYTFTRYWIHWIRQAPGQGLEWMGHINPTTVYTEFNQN
FKDRVTMTRDTSTSTVYMELSSLRSEDTAVYYCARGGSNFFDYWGQGTTVTVSS
>Heavy Chain of hSC16.15 IgG histidine scanning variant #15
(SEQ ID NO: 351)
QVQLVQSGAEVKKPGASVKVSCKASGYTFTRYWIHWIRQAPGQGLEWMGYHNPTTVYTEFNQ
NFKDRVTMTRDTSTSTVYMELSSLRSEDTAVYYCARGGSNFFDYWGQGTTVTVSS
>Heavy Chain of hSC16.15 IgG histidine scanning variant #16
(SEQ ID NO: 352)
QVQLVQSGAEVKKPGASVKVSCKASGYTFTRYWIHWIRQAPGQGLEWMGYIHPTTVYTEFNQN
FKDRVTMTRDTSTSTVYMELSSLRSEDTAVYYCARGGSNFFDYWGQGTTVTVSS
>Heavy Chain of hSC16.15 IgG histidine scanning variant #17
(SEQ ID NO: 353)
QVQLVQSGAEVKKPGASVKVSCKASGYTFTRYWIHWIRQAPGQGLEWMGYINHTTVYTEFNQ
NFKDRVTMTRDTSTSTVYMELSSLRSEDTAVYYCARGGSNFFDYWGQGTTVTVSS
>Heavy Chain of hSC16.15 IgG histidine scanning variant #18
(SEQ ID NO: 354)
QVQLVQSGAEVKKPGASVKVSCKASGYTFTRYWIHWIRQAPGQGLEWMGYINPHTVYTEFNQN
FKDRVTMTRDTSTSTVYMELSSLRSEDTAVYYCARGGSNFFDYWGQGTTVTVSS
>Heavy Chain of hSC16.15 IgG histidine scanning variant #19
(SEQ ID NO: 355)
QVQLVQSGAEVKKPGASVKVSCKASGYTFTRYWIHWIRQAPGQGLEWMGYINPTHVYTEFNQN
FKDRVTMTRDTSTSTVYMELSSLRSEDTAVYYCARGGSNFFDYWGQGTTVTVSS
>Heavy Chain of hSC16.15 IgG histidine scanning variant #20
(SEQ ID NO: 356)
QVQLVQSGAEVKKPGASVKVSCKASGYTFTRYWIHWIRQAPGQGLEWMGYINPTTHYTEFNQN
FKDRVTMTRDTSTSTVYMELSSLRSEDTAVYYCARGGSNFFDYWGQGTTVTVSS
>Heavy Chain of hSC16.15 IgG histidine scanning variant #21
(SEQ ID NO: 357)
QVQLVQSGAEVKKPGASVKVSCKASGYTFTRYWIHWIRQAPGQGLEWMGYINPTTVHTEFNQN
FKDRVTMTRDTSTSTVYMELSSLRSEDTAVYYCARGGSNFFDYWGQGTTVTVSS
>Heavy Chain of hSC16.15 IgG histidine scanning variant #22
(SEQ ID NO: 358)
QVQLVQSGAEVKKPGASVKVSCKASGYTFTRYWIHWIRQAPGQGLEWMGYINPTTVYHEFNQN
FKDRVTMTRDTSTSTVYMELSSLRSEDTAVYYCARGGSNFFDYWGQGTTVTVSS
>Heavy Chain of hSC16.15 IgG histidine scanning variant #23
(SEQ ID NO: 359)
QVQLVQSGAEVKKPGASVKVSCKASGYTFTRYWIHWIRQAPGQGLEWMGYINPTTVYTHFNQN
FKDRVTMTRDTSTSTVYMELSSLRSEDTAVYYCARGGSNFFDYWGQGTTVTVSS
>Heavy Chain of hSC16.15 IgG histidine scanning variant #24
(SEQ ID NO: 360)
QVQLVQSGAEVKKPGASVKVSCKASGYTFTRYWIHWIRQAPGQGLEWMGYINPTTVYTEHNQ
NFKDRVTMTRDTSTSTVYMELSSLRSEDTAVYYCARGGSNFFDYWGQGTTVTVSS
>Heavy Chain of hSC16.15 IgG histidine scanning variant #25
(SEQ ID NO: 361)
QVQLVQSGAEVKKPGASVKVSCKASGYTFTRYWIHWIRQAPGQGLEWMGYINPTTVYTEFHQN
FKDRVTMTRDTSTSTVYMELSS LRS EDTAVYYCARGGSNFFDYWGQGTTVTVSS
>Heavy Chain of hSC16.15 IgG histidine scanning variant #26
(SEQ ID NO: 362)
QVQLVQSGAEVKKPGASVKVSCKASGYTFTRYWIHWIRQAPGQGLEWMGYINPTTVYTEFNHN
FKDRVTMTRDTSTSTVYMELSSLRSEDTAVYYCARGGSNFFDYWGQGTTVTVSS
>Heavy Chain of hSC16.15 IgG histidine scanning variant #27
(SEQ ID NO: 363)
QVQLVQSGAEVKKPGASVKVSCKASGYTFTRYWIHWIRQAPGQGLEWMGYINPTTVYTEFNQH
FKDRVTMTRDTSTSTVYMELSSLRSEDTAVYYCARGGSNFFDYWGQGTTVTVSS
>Heavy Chain of hSC16.15 IgG histidine scanning variant #28
(SEQ ID NO: 364)
QVQLVQSGAEVKKPGASVKVSCKASGYTFTRYWIHWIRQAPGQGLEWMGYINPTTVYTEFNQN
HKDRVTMTRDTSTSTVYMELSSLRSEDTAVYYCARGGSNFFDYWGQGTTVTVSS
>Heavy Chain of hSC16.15 IgG histidine scanning variant #29
(SEQ ID NO: 365)
QVQLVQSGAEVKKPGASVKVSCKASGYTFTRYWIHWIRQAPGQGLEWMGYINPTTVYTEFNQN
FHDRVTMTRDTSTSTVYMELSSLRSEDTAVYYCARGGSNFFDYWGQGTTVTVSS
>Heavy Chain of hSC16.15 IgG histidine scanning variant #30
(SEQ ID NO: 366)
QVQLVQSGAEVKKPGASVKVSCKASGYTFTRYWIHWIRQAPGQGLEWMGYINPTTVYTEFNQN
FKHRVTMTRDTSTSTVYMELSSLRSEDTAVYYCARGGSNFFDYWGQGTTVTVSS
>Heavy Chain of hSC16.15 IgG histidine scanning variant #31
(SEQ ID NO: 367)
QVQLVQSGAEVKKPGASVKVSCKASGYTFTRYWIHWIRQAPGQGLEWMGYINPTTVYTEFNQN
FKDRVTMTRDTSTSTVYMELSSLRSEDTAVYYCHRGGSNFFDYWGQGTTVTVSS
>Heavy Chain of hSC16.15 IgG histidine scanning variant #32
(SEQ ID NO: 368)
QVQLVQSGAEVKKPGASVKVSCKASGYTFTRYWIHWIRQAPGQGLEWMGYINPTTVYTEFNQN
FKDRVTMTRDTSTSTVYMELSSLRSEDTAVYYCAHGGSNFFDYWGQGTTVTVSS
>Heavy Chain of hSC16.15 IgG histidine scanning variant #33
(SEQ ID NO: 369)
QVQLVQSGAEVKKPGASVKVSCKASGYTFTRYWIHWIRQAPGQGLEWMGYINPTTVYTEFNQN
FKDRVTMTRDTSTSTVYMELSSLRSEDTAVYYCARHGSNFFDYWGQGTTVTVSS
>Heavy Chain of hSC16.15 IgG histidine scanning variant #34
(SEQ ID NO: 370)
QVQLVQSGAEVKKPGASVKVSCKASGYTFTRYWIHWIRQAPGQGLEWMGYINPTTVYTEFNQN
FKDRVTMTRDTSTSTVYMELSSLRSEDTAVYYCARGHSNFFDYWGQGTTVTVSS
>Heavy Chain of hSC16.15 IgG histidine scanning variant #35
(SEQ ID NO: 371)
QVQLVQSGAEVKKPGASVKVSCKASGYTFTRYWIHWIRQAPGQGLEWMGYINPTTVYTEFNQN
FKDRVTMTRDTSTSTVYMELSSLRSEDTAVYYCARGGHNFFDYWGQGTTVTVSS
>Heavy Chain of hSC16.15 IgG histidine scanning variant #36
(SEQ ID NO: 372)
QVQLVQSGAEVKKPGASVKVSCKASGYTFTRYWIHWIRQAPGQGLEWMGYINPTTVYTEFNQN
FKDRVTMTRDTSTSTVYMELSSLRSEDTAVYYCARGGSHFFDYWGQGTTVTVSS
>Heavy Chain of hSC16.15 IgG histidine scanning variant #37
(SEQ ID NO: 373)
QVQLVQSGAEVKKPGASVKVSCKASGYTFTRYWIHWIRQAPGQGLEWMGYINPTTVYTEFNQN
FKDRVTMTRDTSTSTVYMELSSLRSEDTAVYYCARGGSNHFDYWGQGTTVTVSS
>Heavy Chain of hSC16.15 IgG histidine scanning variant #38
(SEQ ID NO: 374)
QVQLVQSGAEVKKPGASVKVSCKASGYTFTRYWIHWIRQAPGQGLEWMGYINPTTVYTEFNQN
FKDRVTMTRDTSTSTVYMELSSLRSEDTAVYYCARGGSNFHDYWGQGTTVTVSS
>Heavy Chain of hSC16.15 IgG histidine scanning variant #39
(SEQ ID NO: 375)
QVQLVQSGAEVKKPGASVKVSCKASGYTFTRYWIHWIRQAPGQGLEWMGYINPTTVYTEFNQN
FKDRVTMTRDTSTSTVYMELSSLRSEDTAVYYCARGGSNFFHYWGQGTTVTVSS
>Heavy Chain of hSC16.15 IgG histidine scanning variant #40
(SEQ ID NO: 376)
QVQLVQSGAEVKKPGASVKVSCKASGYTFTRYWIHWIRQAPGQGLEWMGYINPTTVYTEFNQN
FKDRVTMTRDTSTSTVYMELSSLRSEDTAVYYCARGGSNFFDHWGQGTTVTVSS
>Light Chain of hSC16.15 IgG histidine scanning variant #1
(SEQ ID NO: 377)
AIQLTQSPSSLSASVGDRVTITCRASHNIYYNLAWYQQKPGKAPKLLIYTANSLEDGVPSRFSGSG
SGTDFTLTISSLQPEDFATYFCKQAYDVPPTFGGGTKLEIK
>Light Chain of hSC16.15 IgG histidine scanning variant #2
(SEQ ID NO: 378)
AIQLTQSPSSLSASVGDRVTITCRASEHIYYNLAWYQQKPGKAPKLLIYTANSLEDGVPSRFSGSG
SGTDFTLTISSLQPEDFATYFCKQAYDVPPTFGGGTKLEIK
>Light Chain of hSC16.15 IgG histidine scanning variant #3
(SEQ ID NO: 379)
AIQLTQSPSSLSASVGDRVTITCRASENHYYNLAWYQQKPGKAPKLLIYTANSLEDGVPSRFSGS
GSGTDFTLTISSLQPEDFATYFCKQAYDVPPTFGGGTKLEIK
>Light Chain of hSC16.15 IgG histidine scanning variant #4
(SEQ ID NO: 380)
AIQLTQSPSSLSASVGDRVTITCRASENIHYNLAWYQQKPGKAPKLLIYTANSLEDGVPSRFSGSG
SGTDFTLTISSLQPEDFATYFCKQAYDVPPTFGGGTKLEIK
>Light Chain of hSC16.15 IgG histidine scanning variant #5
(SEQ ID NO: 381)
AIQLTQSPSSLSASVGDRVTITCRASENIYHNLAWYQQKPGKAPKLLIYTANSLEDGVPSRFSGSG
SGTDFTLTISSLQPEDFATYFCKQAYDVPPTFGGGTKLEIK
>Light Chain of hSC16.15 IgG histidine scanning variant #6
(SEQ ID NO: 382)
AIQLTQSPSSLSASVGDRVTITCRASENIYYHLAWYQQKPGKAPKLLIYTANSLEDGVPSRFSGSG
SGTDFTLTISSLQPEDFATYFCKQAYDVPPTFGGGTKLEIK
>Light Chain of hSC16.15 IgG histidine scanning variant #7
(SEQ ID NO: 383)
AIQLTQSPSSLSASVGDRVTITCRASENIYYNHAWYQQKPGKAPKLLIYTANSLEDGVPSRFSGSG
SGTDFTLTISSLQPEDFATYFCKQAYDVPPTFGGGTKLEIK
>Light Chain of hSC16.15 IgG histidine scanning variant #8
(SEQ ID NO: 384)
AIQLTQSPSSLSASVGDRVTITCRASENIYYNLHWYQQKPGKAPKLLIYTANSLEDGVPSRFSGSG
SGTDFTLTISSLQPEDFATYFCKQAYDVPPTFGGGTKLEIK
>Light Chain of hSC16.15 IgG histidine scanning variant #9
(SEQ ID NO: 385)
AIQLTQSPSSLSASVGDRVTITCRASENIYYNLAWYQQKPGKAPKLLIYHANSLEDGVPSRFSGSG
SGTDFTLTISSLQPEDFATYFCKQAYDVPPTFGGGTKLEIK
>Light Chain of hSC16.15 IgG histidine scanning variant #10
(SEQ ID NO: 386)
AIQLTQSPSSLSASVGDRVTITCRASENIYYNLAWYQQKPGKAPKLLIYTHNSLEDGVPSRFSGSG
SGTDFTLTISSLQPEDFATYFCKQAYDVPPTFGGGTKLEIK
>Light Chain of hSC16.15 IgG histidine scanning variant #11
(SEQ ID NO: 387)
AIQLTQSPSSLSASVGDRVTITCRASENIYYNLAWYQQKPGKAPKLLIYTAHSLEDGVPSRFSGSG
SGTDFTLTISSLQPEDFATYFCKQAYDVPPTFGGGTKLEIK
>Light Chain of hSC16.15 IgG histidine scanning variant #12
(SEQ ID NO: 388)
AIQLTQSPSSLSASVGDRVTITCRASENIYYNLAWYQQKPGKAPKWYTANHLEDGVPSRFSGSG
SGTDFTLTISSLQPEDFATYFCKQAYDVPPTFGGGTKLEIK
>Light Chain of hSC16.15 IgG histidine scanning variant #13
(SEQ ID NO: 389)
AIQLTQSPSSLSASVGDRVTITCRASENIYYNLAWYQQKPGKAPKLLIYTANSHEDGVPSRFSGSG
SGTDFTLTISSLQPEDFATYFCKQAYDVPPTFGGGTKLEIK
>Light Chain of hSC16.15 IgG histidine scanning variant #14
(SEQ ID NO: 390)
AIQLTQSPSSLSASVGDRVTITCRASENIYYNLAWYQQKPGKAPKLLIYTANSLHDGVPSRFSGSG
SGTDFTLTISSLQPEDFATYFCKQAYDVPPTFGGGTKLEIK
>Light Chain of hSC16.15 IgG histidine scanning variant #15
(SEQ ID NO: 391)
AIQLTQSPSSLSASVGDRVTITCRASENIYYNLAWYQQKPGKAPKLLIYTANSLEHGVPSRFSGSG
SGTDFTLTISSLQPEDFATYFCKQAYDVPPTFGGGTKLEIK
>Light Chain of hSC16.15 IgG histidine scanning variant #16
(SEQ ID NO: 392)
AIQLTQSPSSLSASVGDRVTITCRASENIYYNLAWYQQKPGKAPKLLIYTANSLEDGVPSRFSGSG
SGTDFTLTISSLQPEDFATYFCHQAYDVPPTFGGGTKLEIK
>Light Chain of hSC16.15 IgG histidine scanning variant #17
(SEQ ID NO: 393)
AIQLTQSPSSLSASVGDRVTITCRASENIYYNLAWYQQKPGKAPKLLIYTANSLEDGVPSRFSGSG
SGTDFTLTISSLQPEDFATYFCKHAYDVPPTFGGGTKLEIK
>Light Chain of hSC16.15 IgG histidine scanning variant #18
(SEQ ID NO: 394)
AIQLTQSPSSLSASVGDRVTITCRASENIYYNLAWYQQKPGKAPKLLIYTANSLEDGVPSRFSGSG
SGTDFTLTISSLQPEDFATYFCKQHYDVPPTFGGGTKLEIK
>Light Chain of hSC16.15 IgG histidine scanning variant #19
(SEQ ID NO: 395)
AIQLTQSPSSLSASVGDRVTITCRASENIYYNLAWYQQKPGKAPKLLIYTANSLEDGVPSRFSGSG
SGTDFTLTISSLQPEDFATYFCKQAHDVPPTFGGGTKLEIK
>Light Chain of hSC16.15 IgG histidine scanning variant #20
(SEQ ID NO: 396)
AIQLTQSPSSLSASVGDRVTITCRASENIYYNLAWYQQKPGKAPKLLIYTANSLEDGVPSRFSGSG
SGTDFTLTISSLQPEDFATYFCKQAYHVPPTFGGGTKLEIK
>Light Chain of hSC16.15 IgG histidine scanning variant #21
(SEQ ID NO: 397)
AIQLTQSPSSLSASVGDRVTITCRASENIYYNLAWYQQKPGKAPKLLIYTANSLEDGVPSRFSGSG
SGTDFTLTISSLQPEDFATYFCKQAYDHPPTFGGGTKLEIK
>Light Chain of hSC16.15 IgG histidine scanning variant #22
(SEQ ID NO: 398)
AIQLTQSPSSLSASVGDRVTITCRASENIYYNLAWYQQKPGKAPKLLIYTANSLEDGVPSRFSGSG
SGTDFTLTISSLQPEDFATYFCKQAYDVHPTFGGGTKLEIK
>Light Chain of hSC16.15 IgG histidine scanning variant #23
(SEQ ID NO: 399)
AIQLTQSPSSLSASVGDRVTITCRASENIYYNLAWYQQKPGKAPKLLIYTANSLEDGVPSRFSGSG
SGTDFTLTISSLQPEDFATYFCKQAYDVPHTFGGGTKLEIK
>Light Chain of hSC16.15 IgG histidine scanning variant #24
(SEQ ID NO: 400)
AIQLTQSPSSLSASVGDRVTITCRASENIYYNLAWYQQKPGKAPKWYTANSLEDGVPSRFSGSG
SGTDFTLTISSLQPEDFATYFCKQAYDVPPHFGGGTKLEIK
>Heavy Chain of hSC16.25 IgG
(SEQ ID NO: 401)
QITLKESGPTLVKPTQTLTLTCTFSGFSLSTSGMGVGWIRQPPGKALEWLTDIWWDDNKYYNPSL
KSRLTITKDTSKNQVVLTMTNMDPVDTATYYCARRVNYYYDPYYAMDYWGQGTTLVTVSS
>Light Chain of hSC16.25 IgG
(SEQ ID NO: 402)
EIVLTQSPDFQSVTPKEKVTITCSASSSVSYMHWYQQKPDQSPKLLIKDSSKLASGVPSRFSGSGS
GTDFTLTINSLEAEDAATYYCQQWSSNPLTFGQGTKLEIK
>Heavy Chain of hSC16.25 IgG histidine scanning variant #1
(SEQ ID NO: 403)
QITLKESGPTLVKPTQTLTLTCTFSHFSLSTSGMGVGWIRQPPGKALEWLTDIWWDDNKYYNPSL
KSRLTITKDTSKNQVVLTMTNMDPVDTATYYCARRVNYYYDPYYAMDYWGQGTTLVTVSS
>Heavy Chain of hSC16.25 IgG histidine scanning variant #2
(SEQ ID NO: 404)
QITLKESGPTLVKPTQTLTLTCTFSGHSLSTSGMGVGWIRQPPGKALEWLTDIWWDDNKYYNPS
LKSRLTITKDTSKNQVVLTMTNMDPVDTATYYCARRVNYYYDPYYAMDYWGQGTTLVTVSS
>Heavy Chain of hSC16.25 IgG histidine scanning variant #3
(SEQ ID NO: 405)
QITLKESGPTLVKPTQTLTLTCTFSGFHLSTSGMGVGWIRQPPGKALEWLTDIWWDDNKYYNPS
LKSRLTITKDTSKNQVVLTMTNMDPVDTATYYCARRVNYYYDPYYAMDYWGQGTTLVTVSS
>Heavy Chain of hSC16.25 IgG histidine scanning variant #4
(SEQ ID NO: 406)
QITLKESGPTLVKPTQTLTLTCTFSGFSHSTSGMGVGWIRQPPGKALEWLTDIWWDDNKYYNPS
LKSRLTITKDTSKNQVVLTMTNMDPVDTATYYCARRVNYYYDPYYAMDYWGQGTTLVTVSS
>Heavy Chain of hSC16.25 IgG histidine scanning variant #5
(SEQ ID NO: 407)
QITLKESGPTLVKPTQTLTLTCTFSGFSLHTSGMGVGWIRQPPGKALEWLTDIWWDDNKYYNPS
LKSRLTITKDTSKNQVVLTMTNMDPVDTATYYCARRVNYYYDPYYAMDYWGQGTTLVTVSS
>Heavy Chain of hSC16.25 IgG histidine scanning variant #6
(SEQ ID NO: 408)
QITLKESGPTLVKPTQTLTLTCTFSGFSLSHSGMGVGWIRQPPGKALEWLTDIWWDDNKYYNPS
LKSRLTITKDTSKNQVVLTMTNMDPVDTATYYCARRVNYYYDPYYAMDYWGQGTTLVTVSS
>Heavy Chain of hSC16.25 IgG histidine scanning variant #7
(SEQ ID NO: 409)
QITLKESGPTLVKPTQTLTLTCTFSGFSLSTHGMGVGWIRQPPGKALEWLTDIWWDDNKYYNPS
LKSRLTITKDTSKNQVVLTMTNMDPVDTATYYCARRVNYYYDPYYAMDYWGQGTTLVTVSS
>Heavy Chain of hSC16.25 IgG histidine scanning variant #8
(SEQ ID NO: 410)
QITLKESGPTLVKPTQTLTLTCTFSGFSLSTSHMGVGWIRQPPGKALEWLTDIWWDDNKYYNPSL
KSRLTITKDTSKNQVVLTMTNMDPVDTATYYCARRVNYYYDPYYAMDYWGQGTTLVTVSS
>Heavy Chain of hSC16.25 IgG histidine scanning variant #9
(SEQ ID NO: 411)
QITLKESGPTLVKPTQTLTLTCTFSGFSLSTSGHGVGWIRQPPGKALEWLTDIWWDDNKYYNPSL
KSRLTITKDTSKNQVVLTMTNMDPVDTATYYCARRVNYYYDPYYAMDYWGQGTTLVTVSS
>Heavy Chain of hSC16.25 IgG histidine scanning variant #10
(SEQ ID NO: 412)
QITLKESGPTLVKPTQTLTLTCTFSGFSLSTSGMHVGWIRQPPGKALEWLTDIWWDDNKYYNPSL
KSRLTITKDTSKNQVVLTMTNMDPVDTATYYCARRVNYYYDPYYAMDYWGQGTTLVTVSS
>Heavy Chain of hSC16.25 IgG histidine scanning variant #11
(SEQ ID NO: 413)
QITLKESGPTLVKPTQTLTLTCTFSGFSLSTSGMGHGWIRQPPGKALEWLTDIWWDDNKYYNPSL
KSRLTITKDTSKNQVVLTMTNMDPVDTATYYCARRVNYYYDPYYAMDYWGQGTTLVTVSS
>Heavy Chain of hSC16.25 IgG histidine scanning variant #12
(SEQ ID NO: 414)
QITLKESGPTLVKPTQTLTLTCTFSGFSLSTSGMGVHWIRQPPGKALEWLTDIWWDDNKYYNPSL
KSRLTITKDTSKNQVVLTMTNMDPVDTATYYCARRVNYYYDPYYAMDYWGQGTTLVTVSS
>Heavy Chain of hSC16.25 IgG histidine scanning variant #13
(SEQ ID NO: 415)
QITLKESGPTLVKPTQTLTLTCTFSGFSLSTSGMGVGWIRQPPGKALEWLTHIWWDDNKYYNPSL
KSRLTITKDTSKNQVVLTMTNMDPVDTATYYCARRVNYYYDPYYAMDYWGQGTTLVTVSS
>Heavy Chain of hSC16.25 IgG histidine scanning variant #14
(SEQ ID NO: 416)
QITLKESGPTLVKPTQTLTLTCTFSGFSLSTSGMGVGWIRQPPGKALEWLTDHWWDDNKYYNPS
LKSRLTITKDTSKNQVVLTMTNMDPVDTATYYCARRVNYYYDPYYAMDYWGQGTTLVTVSS
>Heavy Chain of hSC16.25 IgG histidine scanning variant #15
(SEQ ID NO: 417)
QITLKESGPTLVKPTQTLTLTCTFSGFSLSTSGMGVGWIRQPPGKALEWLTDIHWDDNKYYNPSL
KSRLTITKDTSKNQVVLTMTNMDPVDTATYYCARRVNYYYDPYYAMDYWGQGTTLVTVSS
>Heavy Chain of hSC16.25 IgG histidine scanning variant #16
(SEQ ID NO: 418)
QITLKESGPTLVKPTQTLTLTCTFSGFSLSTSGMGVGWIRQPPGKALEWLTDIWHDDNKYYNPSL
KSRLTITKDTSKNQVVLTMTNMDPVDTATYYCARRVNYYYDPYYAMDYWGQGTTLVTVSS
>Heavy Chain of hSC16.25 IgG histidine scanning variant #17
(SEQ ID NO: 419)
QITLKESGPTLVKPTQTLTLTCTFSGFSLSTSGMGVGWIRQPPGKALEWLTDIWWHDNKYYNPSL
KSRLTITKDTSKNQVVLTMTNMDPVDTATYYCARRVNYYYDPYYAMDYWGQGTTLVTVSS
>Heavy Chain of hSC16.25 IgG histidine scanning variant #18
(SEQ ID NO: 420)
QITLKESGPTLVKPTQTLTLTCTFSGFSLSTSGMGVGWIRQPPGKALEWLTDIWWDHNKYYNPSL
KSRLTITKDTSKNQVVLTMTNMDPVDTATYYCARRVNYYYDPYYAMDYWGQGTTLVTVSS
>Heavy Chain of hSC16.25 IgG histidine scanning variant #19
(SEQ ID NO: 421)
QITLKESGPTLVKPTQTLTLTCTFSGFSLSTSGMGVGWIRQPPGKALEWLTDIWWDDHKYYNPSL
KSRLTITKDTSKNQVVLTMTNMDPVDTATYYCARRVNYYYDPYYAMDYWGQGTTLVTVSS
>Heavy Chain of hSC16.25 IgG histidine scanning variant #20
(SEQ ID NO: 422)
QITLKESGPTLVKPTQTLTLTCTFSGFSLSTSGMGVGWIRQPPGKALEWLTDIWWDDNHYYNPSL
KSRLTITKDTSKNQVVLTMTNMDPVDTATYYCARRVNYYYDPYYAMDYWGQGTTLVTVSS
>Heavy Chain of hSC16.25 IgG histidine scanning variant #21
(SEQ ID NO: 423)
QITLKESGPTLVKPTQTLTLTCTFSGFSLSTSGMGVGWIRQPPGKALEWLTDIWWDDNKHYNPSL
KSRLTITKDTSKNQVVLTMTNMDPVDTATYYCARRVNYYYDPYYAMDYWGQGTTLVTVSS
>Heavy Chain of hSC16.25 IgG histidine scanning variant #22
(SEQ ID NO: 424)
QITLKESGPTLVKPTQTLTLTCTFSGFSLSTSGMGVGWIRQPPGKALEWLTDIWWDDNKYHNPSL
KSRLTITKDTSKNQVVLTMTNMDPVDTATYYCARRVNYYYDPYYAMDYWGQGTTLVTVSS
>Heavy Chain of hSC16.25 IgG histidine scanning variant #23
(SEQ ID NO: 425)
QITLKESGPTLVKPTQTLTLTCTFSGFSLSTSGMGVGWIRQPPGKALEWLTDIWWDDNKYYHPSL
KSRLTITKDTSKNQVVLTMTNMDPVDTATYYCARRVNYYYDPYYAMDYWGQGTTLVTVSS
>Heavy Chain of hSC16.25 IgG histidine scanning variant #24
(SEQ ID NO: 426)
QITLKESGPTLVKPTQTLTLTCTFSGFSLSTSGMGVGWIRQPPGKALEWLTDIWWDDNKYYNHS
LKSRLTITKDTSKNQVVLTMTNMDPVDTATYYCARRVNYYYDPYYAMDYWGQGTTLVTVSS
>Heavy Chain of hSC16.25 IgG histidine scanning variant #25
(SEQ ID NO: 427)
QITLKESGPTLVKPTQTLTLTCTFSGFSLSTSGMGVGWIRQPPGKALEWLTDIWWDDNKYYNPH
LKSRLTITKDTSKNQVVLTMTNMDPVDTATYYCARRVNYYYDPYYAMDYWGQGTTLVTVSS
>Heavy Chain of hSC16.25 IgG histidine scanning variant #26
(SEQ ID NO: 428)
QITLKESGPTLVKPTQTLTLTCTFSGFSLSTSGMGVGWIRQPPGKALEWLTDIWWDDNKYYNPS
HKSRLTITKDTSKNQVVLTMTNMDPVDTATYYCARRVNYYYDPYYAMDYWGQGTTLVTVSS
>Heavy Chain of hSC16.25 IgG histidine scanning variant #27
(SEQ ID NO: 429)
QITLKESGPTLVKPTQTLTLTCTFSGFSLSTSGMGVGWIRQPPGKALEWLTDIWWDDNKYYNPSL
HSRLTITKDTSKNQVVLTMTNMDPVDTATYYCARRVNYYYDPYYAMDYWGQGTTLVTVSS
>Heavy Chain of hSC16.25 IgG histidine scanning variant #28
(SEQ ID NO: 430)
QITLKESGPTLVKPTQTLTLTCTFSGFSLSTSGMGVGWIRQPPGKALEWLTDIWWDDNKYYNPSL
KHRLTITKDTSKNQVVLTMTNMDPVDTATYYCARRVNYYYDPYYAMDYWGQGTTLVTVSS
>Heavy Chain of hSC16.25 IgG histidine scanning variant #29
(SEQ ID NO: 431)
QITLKESGPTLVKPTQTLTLTCTFSGFSLSTSGMGVGWIRQPPGKALEWLTDIWWDDNKYYNPSL
KSRLTITKDTSKNQVVLTMTNMDPVDTATYYCHRRVNYYYDPYYAMDYWGQGTTLVTVSS
>Heavy Chain of hSC16.25 IgG histidine scanning variant #30
(SEQ ID NO: 432)
QITLKESGPTLVKPTQTLTLTCTFSGFSLSTSGMGVGWIRQPPGKALEWLTDIWWDDNKYYNPSL
KSRLTITKDTSKNQVVLTMTNMDPVDTATYYCAHRVNYYYDPYYAMDYWGQGTTLVTVSS
>Heavy Chain of hSC16.25 IgG histidine scanning variant #31
(SEQ ID NO: 433)
QITLKESGPTLVKPTQTLTLTCTFSGFSLSTSGMGVGWIRQPPGKALEWLTDIWWDDNKYYNPSL
KSRLTITKDTSKNQVVLTMTNMDPVDTATYYCARHVNYYYDPYYAMDYWGQGTTLVTVSS
>Heavy Chain of hSC16.25 IgG histidine scanning variant #32
(SEQ ID NO: 434)
QITLKESGPTLVKPTQTLTLTCTFSGFSLSTSGMGVGWIRQPPGKALEWLTDIWWDDNKYYNPSL
KSRLTITKDTSKNQVVLTMTNMDPVDTATYYCARRHNYYYDPYYAMDYWGQGTTLVTVSS
>Heavy Chain of hSC16.25 IgG histidine scanning variant #33
(SEQ ID NO: 435)
QITLKESGPTLVKPTQTLTLTCTFSGFSLSTSGMGVGWIRQPPGKALEWLTDIWWDDNKYYNPSL
KSRLTITKDTSKNQVVLTMTNMDPVDTATYYCARRVHYYYDPYYAMDYWGQGTTLVTVSS
>Heavy Chain of hSC16.25 IgG histidine scanning variant #34
(SEQ ID NO: 436)
QITLKESGPTLVKPTQTLTLTCTFSGFSLSTSGMGVGWIRQPPGKALEWLTDIWWDDNKYYNPSL
KSRLTITKDTSKNQVVLTMTNMDPVDTATYYCARRVNHYYDPYYAMDYWGQGTTLVTVSS
>Heavy Chain of hSC16.25 IgG histidine scanning variant #35
(SEQ ID NO: 437)
QITLKESGPTLVKPTQTLTLTCTFSGFSLSTSGMGVGWIRQPPGKALEWLTDIWWDDNKYYNPSL
KSRLTITKDTSKNQVVLTMTNMDPVDTATYYCARRVNYHYDPYYAMDYWGQGTTLVTVSS
>Heavy Chain of hSC16.25 IgG histidine scanning variant #36
(SEQ ID NO: 438)
QITLKESGPTLVKPTQTLTLTCTFSGFSLSTSGMGVGWIRQPPGKALEWLTDIWWDDNKYYNPSL
KSRLTITKDTSKNQVVLTMTNMDPVDTATYYCARRVNYYHDPYYAMDYWGQGTTLVTVSS
>Heavy Chain of hSC16.25 IgG histidine scanning variant #37
(SEQ ID NO: 439)
QITLKESGPTLVKPTQTLTLTCTFSGFSLSTSGMGVGWIRQPPGKALEWLTDIWWDDNKYYNPSL
KSRLTITKDTSKNQVVLTMTNMDPVDTATYYCARRVNYYYHPYYAMDYWGQGTTLVTVSS
>Heavy Chain of hSC16.25 IgG histidine scanning variant #38
(SEQ ID NO: 440)
QITLKESGPTLVKPTQTLTLTCTFSGFSLSTSGMGVGWIRQPPGKALEWLTDIWWDDNKYYNPSL
KSRLTITKDTSKNQVVLTMTNMDPVDTATYYCARRVNYYYDHYYAMDYWGQGTTLVTVSS
>Heavy Chain of hSC16.25 IgG histidine scanning variant #39
(SEQ ID NO: 441)
QITLKESGPTLVKPTQTLTLTCTFSGFSLSTSGMGVGWIRQPPGKALEWLTDIWWDDNKYYNPSL
KSRLTITKDTSKNQVVLTMTNMDPVDTATYYCARRVNYYYDPHYAMDYWGQGTTLVTVSS
>Heavy Chain of hSC16.25 IgG histidine scanning variant #40
(SEQ ID NO: 442)
QITLKESGPTLVKPTQTLTLTCTFSGFSLSTSGMGVGWIRQPPGKALEWLTDIWWDDNKYYNPSL
KSRLTITKDTSKNQVVLTMTNMDPVDTATYYCARRVNYYYDPYHAMDYWGQGTTLVTVSS
>Heavy Chain of hSC16.25 IgG histidine scanning variant #41
(SEQ ID NO: 443)
QITLKESGPTLVKPTQTLTLTCTFSGFSLSTSGMGVGWIRQPPGKALEWLTDIWWDDNKYYNPSL
KSRLTITKDTSKNQVVLTMTNMDPVDTATYYCARRVNYYYDPYYHMDYWGQGTTLVTVSS
>Heavy Chain of hSC16.25 IgG histidine scanning variant #42
(SEQ ID NO: 444)
QITLKESGPTLVKPTQTLTLTCTFSGFSLSTSGMGVGWIRQPPGKALEWLTDIWWDDNKYYNPSL
KSRLTITKDTSKNQVVLTMTNMDPVDTATYYCARRVNYYYDPYYAHDYWGQGTTLVTVSS
>Heavy Chain of hSC16.25 IgG histidine scanning variant #43
(SEQ ID NO: 445)
QITLKESGPTLVKPTQTLTLTCTFSGFSLSTSGMGVGWIRQPPGKALEWLTDIWWDDNKYYNPSL
KSRLTITKDTSKNQVVLTMTNMDPVDTATYYCARRVNYYYDPYYAMHYWGQGTTLVTVSS
>Heavy Chain of hSC16.25 IgG histidine scanning variant #44
(SEQ ID NO: 446)
QITLKESGPTLVKPTQTLTLTCTFSGFSLSTSGMGVGWIRQPPGKALEWLTDIWWDDNKYYNPSL
KSRLTITKDTSKNQVVLTMTNMDPVDTATYYCARRVNYYYDPYYAMDHWGQGTTLVTVSS
>Light Chain of hSC16.25 IgG histidine scanning variant #1
(SEQ ID NO: 447)
EIVLTQSPDFQSVTPKEKVTITCSASHSVSYMHWYQQKPDQSPKLLIKDSSKLASGVPSRFSGSGS
GTDFTLTINSLEAEDAATYYCQQWSSNPLTFGQGTKLEIK
>Light Chain of hSC16.25 IgG histidine scanning variant #2
(SEQ ID NO: 448)
EIVLTQSPDFQSVTPKEKVTITCSASSHVSYMHWYQQKPDQSPKLLIKDSSKLASGVPSRFSGSGS
GTDFTLTINSLEAEDAATYYCQQWSSNPLTFGQGTKLEIK
>Light Chain of hSC16.25 IgG histidine scanning variant #3
(SEQ ID NO: 449)
EIVLTQSPDFQSVTPKEKVTITCSASSSHSYMEIWYQQKPDQSPKLLIKDSSKLASGVPSRFSGSGS
GTDFTLTINSLEAEDAATYYCQQWSSNPLTFGQGTKLEIK
>Light Chain of hSC16.25 IgG histidine scanning variant #4
(SEQ ID NO: 450)
EIVLTQSPDFQSVTPKEKVTITCSASSSVHYMHWYQQKPDQSPKLLIKDSSKLASGVPSRFSGSGS
GTDFTLTINSLEAEDAATYYCQQWSSNPLTFGQGTKLEIK
>Light Chain of hSC16.25 IgG histidine scanning variant #5
(SEQ ID NO: 451)
EIVLTQSPDFQSVTPKEKVTITCSASSSVSHMEIWYQQKPDQSPKLLIKDSSKLASGVPSRFSGSGS
GTDFTLTINSLEAEDAATYYCQQWSSNPLTFGQGTKLEIK
>Light Chain of hSC16.25 IgG histidine scanning variant #6
(SEQ ID NO: 452)
EIVLTQSPDFQSVTPKEKVTITCSASSSVSYHEIWYQQKPDQSPKLLIKDSSKLASGVPSRFSGSGS
GTDFTLTINSLEAEDAATYYCQQWSSNPLTFGQGTKLEIK
>Light Chain of hSC16.25 IgG histidine scanning variant #7
(SEQ ID NO: 453)
EIVLTQSPDFQSVTPKEKVTITCSASSSVSYMAWYQQKPDQSPKLLIKDSSKLASGVPSRFSGSGS
GTDFTLTINSLEAEDAATYYCQQWSSNPLTFGQGTKLEIK
>Light Chain of hSC16.25 IgG histidine scanning variant #8
(SEQ ID NO: 454)
EIVLTQSPDFQSVTPKEKVTITCSASSSVSYMHWYQQKPDQSPKLLIKHSSKLASGVPSRFSGSGS
GTDFTLTINSLEAEDAATYYCQQWSSNPLTFGQGTKLEIK
>Light Chain of hSC16.25 IgG histidine scanning variant #9
(SEQ ID NO: 455)
EIVLTQSPDFQSVTPKEKVTITCSASSSVSYMHWYQQKPDQSPKLLIKDHSKLASGVPSRFSGSGS
GTDFTLTINSLEAEDAATYYCQQWSSNPLTFGQGTKLEIK
>Light Chain of hSC16.25 IgG histidine scanning variant #10
(SEQ ID NO: 456)
EIVLTQSPDFQSVTPKEKVTITCSASSSVSYMHWYQQKPDQSPKLLIKDSHKLASGVPSRFSGSGS
GTDFTLTINSLEAEDAATYYCQQWSSNPLTFGQGTKLEIK
>Light Chain of hSC16.25 IgG histidine scanning variant #11
(SEQ ID NO: 457)
EIVLTQSPDFQSVTPKEKVTITCSASSSVSYMHWYQQKPDQSPKLLIKDSSHLASGVPSRFSGSGS
GTDFTLTINSLEAEDAATYYCQQWSSNPLTFGQGTKLEIK
>Light Chain of hSC16.25 IgG histidine scanning variant #12
(SEQ ID NO: 458)
EIVLTQSPDFQSVTPKEKVTITCSASSSVSYMHWYQQKPDQSPKLLIKDSSKHASGVPSRFSGSGS
GTDFTLTINSLEAEDAATYYCQQWSSNPLTFGQGTKLEIK
>Light Chain of hSC16.25 IgG histidine scanning variant #13
(SEQ ID NO: 459)
EIVLTQSPDFQSVTPKEKVTITCSASSSVSYMHWYQQKPDQSPKLLIKDSSKLHSGVPSRFSGSGS
GTDFTLTINSLEAEDAATYYCQQWSSNPLTFGQGTKLEIK
>Light Chain of hSC16.25 IgG histidine scanning variant #14
(SEQ ID NO: 460)
EIVLTQSPDFQSVTPKEKVTITCSASSSVSYMHWYQQKPDQSPKLLIKDSSKLAHGVPSRFSGSGS
GTDFTLTINSLEAEDAATYYCQQWSSNPLTFGQGTKLEIK
>Light Chain of hSC16.25 IgG histidine scanning variant #15
(SEQ ID NO: 461)
EIVLTQSPDFQSVTPKEKVTITCSASSSVSYMHWYQQKPDQSPKLLIKDSSKLASGVPSRFSGSGS
GTDFTLTINSLEAEDAATYYCHQWSSNPLTFGQGTKLEIK
>Light Chain of hSC16.25 IgG histidine scanning variant #16
(SEQ ID NO: 462)
EIVLTQSPDFQSVTPKEKVTITCSASSSVSYMHWYQQKPDQSPKLLIKDSSKLASGVPSRFSGSGS
GTDFTLTINSLEAEDAATYYCQHWSSNPLTFGQGTKLEIK
>Light Chain of hSC16.25 IgG histidine scanning variant #17
(SEQ ID NO: 463)
EIVLTQSPDFQSVTPKEKVTITCSASSSVSYMEIWYQQKPDQSPKLLIKDSSKLASGVPSRFSGSGS
GTDFTLTINSLEAEDAATYYCQQHSSNPLTFGQGTKLEIK
>Light Chain of hSC16.25 IgG histidine scanning variant #18
(SEQ ID NO: 464)
EIVLTQSPDFQSVTPKEKVTITCSASSSVSYMEIWYQQKPDQSPKLLIKDSSKLASGVPSRFSGSGS
GTDFTLTINSLEAEDAATYYCQQWHSNPLTFGQGTKLEIK
>Light Chain of hSC16.25 IgG histidine scanning variant #19
(SEQ ID NO: 465)
EIVLTQSPDFQSVTPKEKVTITCSASSSVSYMEIWYQQKPDQSPKLLIKDSSKLASGVPSRFSGSGS
GTDFTLTINSLEAEDAATYYCQQWSHNPLTFGQGTKLEIK
>Light Chain of hSC16.25 IgG histidine scanning variant #20
(SEQ ID NO: 466)
EIVLTQSPDFQSVTPKEKVTITCSASSSVSYMEIWYQQKPDQSPKLLIKDSSKLASGVPSRFSGSGS
GTDFTLTINSLEAEDAATYYCQQWSSHPLTFGQGTKLEIK
>Light Chain of hSC16.25 IgG histidine scanning variant #21
(SEQ ID NO: 467)
EIVLTQSPDFQSVTPKEKVTITCSASSSVSYMEIWYQQKPDQSPKLLIKDSSKLASGVPSRFSGSGS
GTDFTLTINSLEAEDAATYYCQQWSSNHLTFGQGTKLEIK
>Light Chain of hSC16.25 IgG histidine scanning variant #22
(SEQ ID NO: 468)
EIVLTQSPDFQSVTPKEKVTITCSASSSVSYMEIWYQQKPDQSPKLLIKDSSKLASGVPSRFSGSGS
GTDFTLTINSLEAEDAATYYCQQWSSNPHTFGQGTKLEIK
>Light Chain of hSC16.25 IgG histidine scanning variant #23
(SEQ ID NO: 469)
EIVLTQSPDFQSVTPKEKVTITCSASSSVSYMEIWYQQKPDQSPKLLIKDSSKLASGVPSRFSGSGS
GTDFTLTINSLEAEDAATYYCQQWSSNPLHFGQGTKLEIK
>Heavy Chain of hSC16.34 IgG
(SEQ ID NO: 470)
QVQLVQSGAEVKKPGASVKVSCKASGYTFTNYGMNWVRQAPGQRLEWMGWINTYTGDPTYA
DDFKGRVTITRDTSASTAYMELSSLRSEDTAVYYCARIGGNSPSDYWGQGTTVTVSS
>Light Chain of hSC16.34 IgG
(SEQ ID NO: 471)
DIQMTQSPSSLSASVGDRVTITCKASQSVSNDVAWYQQKPGKVPKLLIYYASNRYSGVPSRFSGS
GSGTDFTLTISSLQPEDVATYFCQQDYSSPWTFGGGTKVEIK
>Heavy Chain of hSC16.34 IgG histidine scanning variant #1
(SEQ ID NO: 472)
QVQLVQSGAEVKKPGASVKVSCHASGYTFTNYGMNWVRQAPGQRLEWMGWINTYTGDPTYA
DDFKGRVTITRDTSASTAYMELSSLRSEDTAVYYCARIGGNSPSDYWGQGTTVTVSS
>Heavy Chain of hSC16.34 IgG histidine scanning variant #2
(SEQ ID NO: 473)
QVQLVQSGAEVKKPGASVKVSCKHSGYTFTNYGMNWVRQAPGQRLEWMGWINTYTGDPTYA
DDFKGRVTITRDTSASTAYMELSSLRSEDTAVYYCARIGGNSPSDYWGQGTTVTVSS
>Heavy Chain of hSC16.34 IgG histidine scanning variant #3
(SEQ ID NO: 474)
QVQLVQSGAEVKKPGASVKVSCKAHGYTFTNYGMNWVRQAPGQRLEWMGWINTYTGDPTYA
DDFKGRVTITRDTSASTAYMELSSLRSEDTAVYYCARIGGNSPSDYWGQGTTVTVSS
>Heavy Chain of hSC16.34 IgG histidine scanning variant #4
(SEQ ID NO: 475)
QVQLVQSGAEVKKPGASVKVSCKASHYTFTNYGMNWVRQAPGQRLEWMGWINTYTGDPTYA
DDFKGRVTITRDTSASTAYMELSSLRSEDTAVYYCARIGGNSPSDYWGQGTTVTVSS
>Heavy Chain of hSC16.34 IgG histidine scanning variant #5
(SEQ ID NO: 476)
QVQLVQSGAEVKKPGASVKVSCKASGHTFTNYGMNWVRQAPGQRLEWMGWINTYTGDPTYA
DDFKGRVTITRDTSASTAYMELSSLRSEDTAVYYCARIGGNSPSDYWGQGTTVTVSS
>Heavy Chain of hSC16.34 IgG histidine scanning variant #6
(SEQ ID NO: 477)
QVQLVQSGAEVKKPGASVKVSCKASGYHFTNYGMNWVRQAPGQRLEWMGWINTYTGDPTYA
DDFKGRVTITRDTSASTAYMELSSLRSEDTAVYYCARIGGNSPSDYWGQGTTVTVSS
>Heavy Chain of hSC16.34 IgG histidine scanning variant #7
(SEQ ID NO: 478)
QVQLVQSGAEVKKPGASVKVSCKASGYTHTNYGMNWVRQAPGQRLEWMGWINTYTGDPTYA
DDFKGRVTITRDTSASTAYMELSSLRSEDTAVYYCARIGGNSPSDYWGQGTTVTVSS
>Heavy Chain of hSC16.34 IgG histidine scanning variant #8
(SEQ ID NO: 479)
QVQLVQSGAEVKKPGASVKVSCKASGYTFHNYGMNWVRQAPGQRLEWMGWINTYTGDPTYA
DDFKGRVTITRDTSASTAYMELSSLRSEDTAVYYCARIGGNSPSDYWGQGTTVTVSS
>Heavy Chain of hSC16.34 IgG histidine scanning variant #9
(SEQ ID NO: 480)
QVQLVQSGAEVKKPGASVKVSCKASGYTFTHYGMNWVRQAPGQRLEWMGWINTYTGDPTYA
DDFKGRVTITRDTSASTAYMELSSLRSEDTAVYYCARIGGNSPSDYWGQGTTVTVSS
>Heavy Chain of hSC16.34 IgG histidine scanning variant #10
(SEQ ID NO: 481)
QVQLVQSGAEVKKPGASVKVSCKASGYTFTNHGMNWVRQAPGQRLEWMGWINTYTGDPTYA
DDFKGRVTITRDTSASTAYMELSSLRSEDTAVYYCARIGGNSPSDYWGQGTTVTVSS
>Heavy Chain of hSC16.34 IgG histidine scanning variant #11
(SEQ ID NO: 482)
QVQLVQSGAEVKKPGASVKVSCKASGYTFTNYHMNWVRQAPGQRLEWMGWINTYTGDPTYA
DDFKGRVTITRDTSASTAYMELSSLRSEDTAVYYCARIGGNSPSDYWGQGTTVTVSS
>Heavy Chain of hSC16.34 IgG histidine scanning variant #12
(SEQ ID NO: 483)
QVQLVQSGAEVKKPGASVKVSCKASGYTFTNYGHNWVRQAPGQRLEWMGWINTYTGDPTYA
DDFKGRVTITRDTSASTAYMELSSLRSEDTAVYYCARIGGNSPSDYWGQGTTVTVSS
>Heavy Chain of hSC16.34 IgG histidine scanning variant #13
(SEQ ID NO: 484)
QVQLVQSGAEVKKPGASVKVSCKASGYTFTNYGMHWVRQAPGQRLEWMGWINTYTGDPTYA
DDFKGRVTITRDTSASTAYMELSSLRSEDTAVYYCARIGGNSPSDYWGQGTTVTVSS
>Heavy Chain of hSC16.34 IgG histidine scanning variant #14
(SEQ ID NO: 485)
QVQLVQSGAEVKKPGASVKVSCKASGYTFTNYGMNWVRQAPGQRLEWMGHINTYTGDPTYA
DDFKGRVTITRDTSASTAYMELSSLRSEDTAVYYCARIGGNSPSDYWGQGTTVTVSS
>Heavy Chain of hSC16.34 IgG histidine scanning variant #15
(SEQ ID NO: 486)
QVQLVQSGAEVKKPGASVKVSCKASGYTFTNYGMNWVRQAPGQRLEWMGWHNTYTGDPTY
ADDFKGRVTITRDTSASTAYMELSSLRSEDTAVYYCARIGGNSPSDYWGQGTTVTVSS
>Heavy Chain of hSC16.34 IgG histidine scanning variant #16
(SEQ ID NO: 487)
QVQLVQSGAEVKKPGASVKVSCKASGYTFTNYGMNWVRQAPGQRLEWMGWIHTYTGDPTYA
DDFKGRVTITRDTSASTAYMELSSLRSEDTAVYYCARIGGNSPSDYWGQGTTVTVSS
>Heavy Chain of hSC16.34 IgG histidine scanning variant #17
(SEQ ID NO: 488)
QVQLVQSGAEVKKPGASVKVSCKASGYTFTNYGMNWVRQAPGQRLEWMGWIHTYTGDPTYA
DDFKGRVTITRDTSASTAYMELSSLRSEDTAVYYCARIGGNSPSDYWGQGTTVTVSS
>Heavy Chain of hSC16.34 IgG histidine scanning variant #18
(SEQ ID NO: 489)
QVQLVQSGAEVKKPGASVKVSCKASGYTFTNYGMNWVRQAPGQRLEWMGWINTHTGDPTYA
DDFKGRVTITRDTSASTAYMELSSLRSEDTAVYYCARIGGNSPSDYWGQGTTVTVSS
>Heavy Chain of hSC16.34 IgG histidine scanning variant #19
(SEQ ID NO: 490)
QVQLVQSGAEVKKPGASVKVSCKASGYTFTNYGMNWVRQAPGQRLEWMGWINTYHGDPTYA
DDFKGRVTITRDTSASTAYMELSSLRSEDTAVYYCARIGGNSPSDYWGQGTTVTVSS
>Heavy Chain of hSC16.34 IgG histidine scanning variant #20
(SEQ ID NO: 491)
QVQLVQSGAEVKKPGASVKVSCKASGYTFTNYGMNWVRQAPGQRLEWMGWINTYTHDPTYA
DDFKGRVTITRDTSASTAYMELSSLRSEDTAVYYCARIGGNSPSDYWGQGTTVTVSS
>Heavy Chain of hSC16.34 IgG histidine scanning variant #21
(SEQ ID NO: 492)
QVQLVQSGAEVKKPGASVKVSCKASGYTFTNYGMNWVRQAPGQRLEWMGWINTYTGHPTYA
DDFKGRVTITRDTSASTAYMELSSLRSEDTAVYYCARIGGNSPSDYWGQGTTVTVSS
>Heavy Chain of hSC16.34 IgG histidine scanning variant #22
(SEQ ID NO: 493)
QVQLVQSGAEVKKPGASVKVSCKASGYTFTNYGMNWVRQAPGQRLEWMGWINTYTGDHTYA
DDFKGRVTITRDTSASTAYMELSSLRSEDTAVYYCARIGGNSPSDYWGQGTTVTVSS
>Heavy Chain of hSC16.34 IgG histidine scanning variant #23
(SEQ ID NO: 494)
QVQLVQSGAEVKKPGASVKVSCKASGYTFTNYGMNWVRQAPGQRLEWMGWINTYTGDPHYA
DDFKGRVTITRDTSASTAYMELSSLRSEDTAVYYCARIGGNSPSDYWGQGTTVTVSS
>Heavy Chain of hSC16.34 IgG histidine scanning variant #24
(SEQ ID NO: 495)
QVQLVQSGAEVKKPGASVKVSCKASGYTFTNYGMNWVRQAPGQRLEWMGWINTYTGDPTHA
DDFKGRVTITRDTSASTAYMELSSLRSEDTAVYYCARIGGNSPSDYWGQGTTVTVSS
>Heavy Chain of hSC16.34 IgG histidine scanning variant #25
(SEQ ID NO: 496)
QVQLVQSGAEVKKPGASVKVSCKASGYTFTNYGMNWVRQAPGQRLEWMGWINTYTGDPTYH
DDFKGRVTITRDTSASTAYMELSSLRSEDTAVYYCARIGGNSPSDYWGQGTTVTVSS
>Heavy Chain of hSC16.34 IgG histidine scanning variant #26
(SEQ ID NO: 497)
QVQLVQSGAEVKKPGASVKVSCKASGYTFTNYGMNWVRQAPGQRLEWMGWINTYTGDPTYA
HDFKGRVTITRDTSASTAYMELSSLRSEDTAVYYCARIGGNSPSDYWGQGTTVTVSS
>Heavy Chain of hSC16.34 IgG histidine scanning variant #27
(SEQ ID NO: 498)
QVQLVQSGAEVKKPGASVKVSCKASGYTFTNYGMNWVRQAPGQRLEWMGWINTYTGDPTYA
DHFKGRVTITRDTSASTAYMELSSLRSEDTAVYYCARIGGNSPSDYWGQGTTVTVSS
>Heavy Chain of hSC16.34 IgG histidine scanning variant #28
(SEQ ID NO: 499)
QVQLVQSGAEVKKPGASVKVSCKASGYTFTNYGMNWVRQAPGQRLEWMGWINTYTGDPTYA
DDHKGRVTITRDTSASTAYMELSSLRSEDTAVYYCARIGGNSPSDYWGQGTTVTVSS
>Heavy Chain of hSC16.34 IgG histidine scanning variant #29
(SEQ ID NO: 500)
QVQLVQSGAEVKKPGASVKVSCKASGYTFTNYGMNWVRQAPGQRLEWMGWINTYTGDPTYA
DDFHGRVTITRDTSASTAYMELSSLRSEDTAVYYCARIGGNSPSDYWGQGTTVTVSS
>Heavy Chain of hSC16.34 IgG histidine scanning variant #30
(SEQ ID NO: 501)
QVQLVQSGAEVKKPGASVKVSCKASGYTFTNYGMNWVRQAPGQRLEWMGWINTYTGDPTYA
DDFKHRVTITRDTSASTAYMELSSLRSEDTAVYYCARIGGNSPSDYWGQGTTVTVSS
>Heavy Chain of hSC16.34 IgG histidine scanning variant #31
(SEQ ID NO: 502)
QVQLVQSGAEVKKPGASVKVSCKASGYTFTNYGMNWVRQAPGQRLEWMGWINTYTGDPTYA
DDFKGRVTITRDTSASTAYMELSSLRSEDTAVYYCHRIGGNSPSDYWGQGTTVTVSS
>Heavy Chain of hSC16.34 IgG histidine scanning variant #32
(SEQ ID NO: 503)
QVQLVQSGAEVKKPGASVKVSCKASGYTFTNYGMNWVRQAPGQRLEWMGWINTYTGDPTYA
DDFKGRVTITRDTSASTAYMELSSLRSEDTAVYYCAHIGGNSPSDYWGQGTTVTVSS
>Heavy Chain of hSC16.34 IgG histidine scanning variant #33
(SEQ ID NO: 504)
QVQLVQSGAEVKKPGASVKVSCKASGYTFTNYGMNWVRQAPGQRLEWMGWINTYTGDPTYA
DDFKGRVTITRDTSASTAYMELSSLRSEDTAVYYCARHGGNSPSDYWGQGTTVTVSS
>Heavy Chain of hSC16.34 IgG histidine scanning variant #34
(SEQ ID NO: 505)
QVQLVQSGAEVKKPGASVKVSCKASGYTFTNYGMNWVRQAPGQRLEWMGWINTYTGDPTYA
DDFKGRVTITRDTSASTAYMELSSLRSEDTAVYYCARIHGNSPSDYWGQGTTVTVSS
>Heavy Chain of hSC16.34 IgG histidine scanning variant #35
(SEQ ID NO: 506)
QVQLVQSGAEVKKPGASVKVSCKASGYTFTNYGMNWVRQAPGQRLEWMGWINTYTGDPTYA
DDFKGRVTITRDTSASTAYMELSSLRSEDTAVYYCARIGHNSPSDYWGQGTTVTVSS
>Heavy Chain of hSC16.34 IgG histidine scanning variant #36
(SEQ ID NO: 507)
QVQLVQSGAEVKKPGASVKVSCKASGYTFTNYGMNWVRQAPGQRLEWMGWINTYTGDPTYA
DDFKGRVTITRDTSASTAYMELSSLRSEDTAVYYCARIGGHSPSDYWGQGTTVTVSS
>Heavy Chain of hSC16.34 IgG histidine scanning variant #37
(SEQ ID NO: 508)
QVQLVQSGAEVKKPGASVKVSCKASGYTFTNYGMNWVRQAPGQRLEWMGWINTYTGDPTYA
DDFKGRVTITRDTSASTAYMELSSLRSEDTAVYYCARIGGNHPSDYWGQGTTVTVSS
>Heavy Chain of hSC16.34 IgG histidine scanning variant #38
(SEQ ID NO: 509)
QVQLVQSGAEVKKPGASVKVSCKASGYTFTNYGMNWVRQAPGQRLEWMGWINTYTGDPTYA
DDFKGRVTITRDTSASTAYMELSSLRSEDTAVYYCARIGGNSHSDYWGQGTTVTVSS
>Heavy Chain of hSC16.34 IgG histidine scanning variant #39
(SEQ ID NO: 510)
QVQLVQSGAEVKKPGASVKVSCKASGYTFTNYGMNWVRQAPGQRLEWMGWINTYTGDPTYA
DDFKGRVTITRDTSASTAYMELSSLRSEDTAVYYCARIGGNSPHDYWGQGTTVTVSS
>Heavy Chain of hSC16.34 IgG histidine scanning variant #40
(SEQ ID NO: 511)
QVQLVQSGAEVKKPGASVKVSCKASGYTFTNYGMNWVRQAPGQRLEWMGWINTYTGDPTYA
DDFKGRVTITRDTSASTAYMELSSLRSEDTAVYYCARIGGNSPSHYWGQGTTVTVSS
>Heavy Chain of hSC16.34 IgG histidine scanning variant #41
(SEQ ID NO: 512)
QVQLVQSGAEVKKPGASVKVSCKASGYTFTNYGMNWVRQAPGQRLEWMGWINTYTGDPTYA
DDFKGRVTITRDTSASTAYMELSSLRSEDTAVYYCARIGGNSPSDHWGQGTTVTVSS
>Light Chain of hSC16.34 IgG histidine scanning variant #1
(SEQ ID NO: 513)
DIQMTQSPSSLSASVGDRVTITCKASHSVSNDVAWYQQKPGKVPKLLIYYASNRYSGVPSRFSGS
GSGTDFTLTISSLQPEDVATYFCQQDYSSPWTFGGGTKVEIK
>Light Chain of hSC16.34 IgG histidine scanning variant #2
(SEQ ID NO: 514)
DIQMTQSPSSLSASVGDRVTITCKASQHVSNDVAWYQQKPGKVPKLLIYYASNRYSGVPSRFSGS
GSGTDFTLTISSLQPEDVATYFCQQDYSSPWTFGGGTKVEIK
>Light Chain of hSC16.34 IgG histidine scanning variant #3
(SEQ ID NO: 515)
DIQMTQSPSSLSASVGDRVTITCKASQSHSNDVAWYQQKPGKVPKLLIYYASNRYSGVPSRFSGS
GSGTDFTLTISSLQPEDVATYFCQQDYSSPWTFGGGTKVEIK
>Light Chain of hSC16.34 IgG histidine scanning variant #4
(SEQ ID NO: 516)
DIQMTQSPSSLSASVGDRVTITCKASQSVHNDVAWYQQKPGKVPKLLIYYASNRYSGVPSRFSGS
GSGTDFTLTISSLQPEDVATYFCQQDYSSPWTFGGGTKVEIK
>Light Chain of hSC16.34 IgG histidine scanning variant #5
(SEQ ID NO: 517)
DIQMTQSPSSLSASVGDRVTITCKASQSVSHDVAWYQQKPGKVPKLLIYYASNRYSGVPSRFSGS
GSGTDFTLTISSLQPEDVATYFCQQDYSSPWTFGGGTKVEIK
>Light Chain of hSC16.34 IgG histidine scanning variant #6
(SEQ ID NO: 518)
DIQMTQSPSSLSASVGDRVTITCKASQSVSNHVAWYQQKPGKVPKLLIYYASNRYSGVPSRFSGS
GSGTDFTLTISSLQPEDVATYFCQQDYSSPWTFGGGTKVEIK
>Light Chain of hSC16.34 IgG histidine scanning variant #7
(SEQ ID NO: 519)
DIQMTQSPSSLSASVGDRVTITCKASQSVSNDHAWYQQKPGKVPKLLIYYASNRYSGVPSRFSGS
GSGTDFTLTISSLQPEDVATYFCQQDYSSPWTFGGGTKVEIK
>Light Chain of hSC16.34 IgG histidine scanning variant #8
(SEQ ID NO: 520)
DIQMTQSPSSLSASVGDRVTITCKASQSVSNDVHWYQQKPGKVPKLLIYYASNRYSGVPSRFSGS
GSGTDFTLTISSLQPEDVATYFCQQDYSSPWTFGGGTKVEIK
>Light Chain of hSC16.34 IgG histidine scanning variant #9
(SEQ ID NO: 521)
DIQMTQSPSSLSASVGDRVTITCKASQSVSNDVAWYQQKPGKVPKLLIYHASNRYSGVPSRFSGS
GSGTDFTLTISSLQPEDVATYFCQQDYSSPWTFGGGTKVEIK
>Light Chain of hSC16.34 IgG histidine scanning variant #10
(SEQ ID NO: 522)
DIQMTQSPSSLSASVGDRVTITCKASQSVSNDVAWYQQKPGKVPKLLIYYHSNRYSGVPSRFSGS
GSGTDFTLTISSLQPEDVATYFCQQDYSSPWTFGGGTKVEIK
>Light Chain of hSC16.34 IgG histidine scanning variant #11
(SEQ ID NO: 523)
DIQMTQSPSSLSASVGDRVTITCKASQSVSNDVAWYQQKPGKVPKLLIYYAHNRYSGVPSRFSGS
GSGTDFTLTISSLQPEDVATYFCQQDYSSPWTFGGGTKVEIK
>Light Chain of hSC16.34 IgG histidine scanning variant #12
(SEQ ID NO: 524)
DIQMTQSPSSLSASVGDRVTITCKASQSVSNDVAWYQQKPGKVPKLLIYYASHRYSGVPSRFSGS
GSGTDFTLTISSLQPEDVATYFCQQDYSSPWTFGGGTKVEIK
>Light Chain of hSC16.34 IgG histidine scanning variant #13
(SEQ ID NO: 525)
DIQMTQSPSSLSASVGDRVTITCKASQSVSNDVAWYQQKPGKVPKLLIYYASNHYSGVPSRFSGS
GSGTDFTLTISSLQPEDVATYFCQQDYSSPWTFGGGTKVEIK
>Light Chain of hSC16.34 IgG histidine scanning variant #14
(SEQ ID NO: 526)
DIQMTQSPSSLSASVGDRVTITCKASQSVSNDVAWYQQKPGKVPKLLIYYASNRHSGVPSRFSGS
GSGTDFTLTISSLQPEDVATYFCQQDYSSPWTFGGGTKVEIK
>Light Chain of hSC16.34 IgG histidine scanning variant #15
(SEQ ID NO: 527)
DIQMTQSPSSLSASVGDRVTITCKASQSVSNDVAWYQQKPGKVPKLLIYYASNRYHGVPSRFSGS
GSGTDFTLTISSLQPEDVATYFCQQDYSSPWTFGGGTKVEIK
>Light Chain of hSC16.34 IgG histidine scanning variant #16
(SEQ ID NO: 528)
DIQMTQSPSSLSASVGDRVTITCKASQSVSNDVAWYQQKPGKVPKLLIYYASNRYSGVPSRFSGS
GSGTDFTLTISSLQPEDVATYFCHQDYSSPWTFGGGTKVEIK
>Light Chain of hSC16.34 IgG histidine scanning variant #17
(SEQ ID NO: 529)
DIQMTQSPSSLSASVGDRVTITCKASQSVSNDVAWYQQKPGKVPKLLIYYASNRYSGVPSRFSGS
GSGTDFTLTISSLQPEDVATYFCQHDYSSPWTFGGGTKVEIK
>Light Chain of hSC16.34 IgG histidine scanning variant #18
(SEQ ID NO: 530)
DIQMTQSPSSLSASVGDRVTITCKASQSVSNDVAWYQQKPGKVPKLLIYYASNRYSGVPSRFSGS
GSGTDFTLTISSLQPEDVATYFCQQHYSSPWTFGGGTKVEIK
>Light Chain of hSC16.34 IgG histidine scanning variant #19
(SEQ ID NO: 531)
DIQMTQSPSSLSASVGDRVTITCKASQSVSNDVAWYQQKPGKVPKLLIYYASNRYSGVPSRFSGS
GSGTDFTLTISSLQPEDVATYFCQQDHSSPWTFGGGTKVEIK
>Light Chain of hSC16.34 IgG histidine scanning variant #20
(SEQ ID NO: 532)
DIQMTQSPSSLSASVGDRVTITCKASQSVSNDVAWYQQKPGKVPKLLIYYASNRYSGVPSRFSGS
GSGTDFTLTISSLQPEDVATYFCQQDYHSPWTFGGGTKVEIK
>Light Chain of hSC16.34 IgG histidine scanning variant #21
(SEQ ID NO: 533)
DIQMTQSPSSLSASVGDRVTITCKASQSVSNDVAWYQQKPGKVPKLLIYYASNRYSGVPSRFSGS
GSGTDFTLTISSLQPEDVATYFCQQDYSHPWTFGGGTKVEIK
>Light Chain of hSC16.34 IgG histidine scanning variant #22
(SEQ ID NO: 534)
DIQMTQSPSSLSASVGDRVTITCKASQSVSNDVAWYQQKPGKVPKLLIYYASNRYSGVPSRFSGS
GSGTDFTLTISSLQPEDVATYFCQQDYSSHWTFGGGTKVEIK
>Light Chain of hSC16.34 IgG histidine scanning variant #23
(SEQ ID NO: 535)
DIQMTQSPSSLSASVGDRVTITCKASQSVSNDVAWYQQKPGKVPKLLIYYASNRYSGVPSRFSGS
GSGTDFTLTISSLQPEDVATYFCQQDYSSPHTFGGGTKVEIK
>Light Chain of hSC16.34 IgG histidine scanning variant #24
(SEQ ID NO: 536)
DIQMTQSPSSLSASVGDRVTITCKASQSVSNDVAWYQQKPGKVPKLLIYYASNRYSGVPSRFSGS
GSGTDFTLTISSLQPEDVATYFCQQDYSSPWHFGGGTKVEIK
>Heavy Chain of SC16.67 IgG
(SEQ ID NO: 537)
EVQLVETGGGLVQPKGSLKLSCAVSAFTFTTYAMNWVRQAPGKGLEWVARIRNKSNNYATYY
ADSVKDRFTISRDDSQSMLYLQMNNLKIEDTAMYYCVFYYDYVYWGQGTLVTVSA
>Light Chain of SC16.67 IgG
(SEQ ID NO: 538)
QAVVTQESALTTSPGETVTLTCRSSTGAVTTSNYANWIQEKPDHLFTGLIGGTNNRAPGVPARFS
GSLIGDKAALTITGAQTEDEAIYFCGLWYSNHLVFGGGTKLTVL
>Heavy Chain of SC16.67 IgG histidine scanning variant #1
(SEQ ID NO: 539)
EVQLVETGGGLVQPKGSLKLSCAVSHFTFTTYAMNWVRQAPGKGLEWVARIRNKSNNYATYY
ADSVKDRFTISRDDSQSMLYLQMNNLKIEDTAMYYCVFYYDYVYWGQGTLVTVSA
>Heavy Chain of SC16.67 IgG histidine scanning variant #2
(SEQ ID NO: 540)
EVQLVETGGGLVQPKGSLKLSCAVSAHTFTTYAMNWVRQAPGKGLEWVARIRNKSNNYATYY
ADSVKDRFTISRDDSQSMLYLQMNNLKIEDTAMYYCVFYYDYVYWGQGTLVTVSA
>Heavy Chain of SC16.67 IgG histidine scanning variant #3
(SEQ ID NO: 541)
EVQLVETGGGLVQPKGSLKLSCAVSAFHFTTYAMNWVRQAPGKGLEWVARIRNKSNNYATYY
ADSVKDRFTISRDDSQSMLYLQMNNLKIEDTAMYYCVFYYDYVYWGQGTLVTVSA
>Heavy Chain of SC16.67 IgG histidine scanning variant #4
(SEQ ID NO: 542)
EVQLVETGGGLVQPKGSLKLSCAVSAFTHTTYAMNWVRQAPGKGLEWVARIRNKSNNYATYY
ADSVKDRFTISRDDSQSMLYLQMNNLKIEDTAMYYCVFYYDYVYWGQGTLVTVSA
>Heavy Chain of SC16.67 IgG histidine scanning variant #5
(SEQ ID NO: 543)
EVQLVETGGGLVQPKGSLKLSCAVSAFTFHTYAMNWVRQAPGKGLEWVARIRNKSNNYATYY
ADSVKDRFTISRDDSQSMLYLQMNNLKIEDTAMYYCVFYYDYVYWGQGTLVTVSA
>Heavy Chain of SC16.67 IgG histidine scanning variant #6
(SEQ ID NO: 544)
EVQLVETGGGLVQPKGSLKLSCAVSAFTFTHYAMNWVRQAPGKGLEWVARIRNKSNNYATYY
ADSVKDRFTISRDDSQSMLYLQMNNLKIEDTAMYYCVFYYDYVYWGQGTLVTVSA
>Heavy Chain of SC16.67 IgG histidine scanning variant #7
(SEQ ID NO: 545)
EVQLVETGGGLVQPKGSLKLSCAVSAFTFTTHAMNWVRQAPGKGLEWVARIRNKSNNYATYY
ADSVKDRFTISRDDSQSMLYLQMNNLKIEDTAMYYCVFYYDYVYWGQGTLVTVSA
>Heavy Chain of SC16.67 IgG histidine scanning variant #8
(SEQ ID NO: 546)
EVQLVETGGGLVQPKGSLKLSCAVSAFTFTTYHMNWVRQAPGKGLEWVARIRNKSNNYATYY
ADSVKDRFTISRDDSQSMLYLQMNNLKIEDTAMYYCVFYYDYVYWGQGTLVTVSA
>Heavy Chain of SC16.67 IgG histidine scanning variant #9
(SEQ ID NO: 547)
EVQLVETGGGLVQPKGSLKLSCAVSAFTFTTYAHNWVRQAPGKGLEWVARIRNKSNNYATYY
ADSVKDRFTISRDDSQSMLYLQMNNLKIEDTAMYYCVFYYDYVYWGQGTLVTVSA
>Heavy Chain of SC16.67 IgG histidine scanning variant #10
(SEQ ID NO: 548)
EVQLVETGGGLVQPKGSLKLSCAVSAFTFTTYAMHWVRQAPGKGLEWVARIRNKSNNYATYY
ADSVKDRFTISRDDSQSMLYLQMNNLKIEDTAMYYCVFYYDYVYWGQGTLVTVSA
>Heavy Chain of SC16.67 IgG histidine scanning variant #11
(SEQ ID NO: 549)
EVQLVETGGGLVQPKGSLKLSCAVSAFTFTTYAMNWVRQAPGKGLEWVAHIRNKSNNYATYY
ADSVKDRFTISRDDSQSMLYLQMNNLKIEDTAMYYCVFYYDYVYWGQGTLVTVSA
>Heavy Chain of SC16.67 IgG histidine scanning variant #12
(SEQ ID NO: 550)
EVQLVETGGGLVQPKGSLKLSCAVSAFTFTTYAMNWVRQAPGKGLEWVARHRNKSNNYATYY
ADSVKDRFTISRDDSQSMLYLQMNNLKIEDTAMYYCVFYYDYVYWGQGTLVTVSA
>Heavy Chain of SC16.67 IgG histidine scanning variant #13
(SEQ ID NO: 551)
EVQLVETGGGLVQPKGSLKLSCAVSAFTFTTYAMNWVRQAPGKGLEWVARIHNKSNNYATYY
ADSVKDRFTISRDDSQSMLYLQMNNLKIEDTAMYYCVFYYDYVYWGQGTLVTVSA
>Heavy Chain of SC16.67 IgG histidine scanning variant #14
(SEQ ID NO: 552)
EVQLVETGGGLVQPKGSLKLSCAVSAFTFTTYAMNWVRQAPGKGLEWVARIRHKSNNYATYY
ADSVKDRFTISRDDSQSMLYLQMNNLKIEDTAMYYCVFYYDYVYWGQGTLVTVSA
>Heavy Chain of SC16.67 IgG histidine scanning variant #15
(SEQ ID NO: 553)
EVQLVETGGGLVQPKGSLKLSCAVSAFTFTTYAMNWVRQAPGKGLEWVARIRNHSNNYATYY
ADSVKDRFTISRDDSQSMLYLQMNNLKIEDTAMYYCVFYYDYVYWGQGTLVTVSA
>Heavy Chain of SC16.67 IgG histidine scanning variant #16
(SEQ ID NO: 554)
EVQLVETGGGLVQPKGSLKLSCAVSAFTFTTYAMNWVRQAPGKGLEWVARIRNKHNNYATYY
ADSVKDRFTISRDDSQSMLYLQMNNLKIEDTAMYYCVFYYDYVYWGQGTLVTVSA
>Heavy Chain of SC16.67 IgG histidine scanning variant #17
(SEQ ID NO: 555)
EVQLVETGGGLVQPKGSLKLSCAVSAFTFTTYAMNWVRQAPGKGLEWVARIRNKSHNYATYY
ADSVKDRFTISRDDSQSMLYLQMNNLKIEDTAMYYCVFYYDYVYWGQGTLVTVSA
>Heavy Chain of SC16.67 IgG histidine scanning variant #18
(SEQ ID NO: 556)
EVQLVETGGGLVQPKGSLKLSCAVSAFTFTTYAMNWVRQAPGKGLEWVARIRNKSNHYATYY
ADSVKDRFTISRDDSQSMLYLQMNNLKIEDTAMYYCVFYYDYVYWGQGTLVTVSA
>Heavy Chain of SC16.67 IgG histidine scanning variant #19
(SEQ ID NO: 557)
EVQLVETGGGLVQPKGSLKLSCAVSAFTFTTYAMNWVRQAPGKGLEWVARIRNKSNNHATYY
ADSVKDRFTISRDDSQSMLYLQMNNLKIEDTAMYYCVFYYDYVYWGQGTLVTVSA
>Heavy Chain of SC16.67 IgG histidine scanning variant #20
(SEQ ID NO: 558)
EVQLVETGGGLVQPKGSLKLSCAVSAFTFTTYAMNWVRQAPGKGLEWVARIRNKSNNYHTYY
ADSVKDRFTISRDDSQSMLYLQMNNLKIEDTAMYYCVFYYDYVYWGQGTLVTVSA
>Heavy Chain of SC16.67 IgG histidine scanning variant #21
(SEQ ID NO: 559)
EVQLVETGGGLVQPKGSLKLSCAVSAFTFTTYAMNWVRQAPGKGLEWVARIRNKSNNYAHYY
ADSVKDRFTISRDDSQSMLYLQMNNLKIEDTAMYYCVFYYDYVYWGQGTLVTVSA
>Heavy Chain of SC16.67 IgG histidine scanning variant #22
(SEQ ID NO: 560)
EVQLVETGGGLVQPKGSLKLSCAVSAFTFTTYAMNWVRQAPGKGLEWVARIRNKSNNYATHY
ADSVKDRFTISRDDSQSMLYLQMNNLKIEDTAMYYCVFYYDYVYWGQGTLVTVSA
>Heavy Chain of SC16.67 IgG histidine scanning variant #23
(SEQ ID NO: 561)
EVQLVETGGGLVQPKGSLKLSCAVSAFTFTTYAMNWVRQAPGKGLEWVARIRNKSNNYATYH
ADSVKDRFTISRDDSQSMLYLQMNNLKIEDTAMYYCVFYYDYVYWGQGTLVTVSA
>Heavy Chain of SC16.67 IgG histidine scanning variant #24
(SEQ ID NO: 562)
EVQLVETGGGLVQPKGSLKLSCAVSAFTFTTYAMNWVRQAPGKGLEWVARIRNKSNNYATYY
HDSVKDRFTISRDDSQSMLYLQMNNLKIEDTAMYYCVFYYDYVYWGQGTLVTVSA
>Heavy Chain of SC16.67 IgG histidine scanning variant #25
(SEQ ID NO: 563)
EVQLVETGGGLVQPKGSLKLSCAVSAFTFTTYAMNWVRQAPGKGLEWVARIRNKSNNYATYY
AHSVKDRFTISRDDSQSMLYLQMNNLKIEDTAMYYCVFYYDYVYWGQGTLVTVSA
>Heavy Chain of SC16.67 IgG histidine scanning variant #26
(SEQ ID NO: 564)
EVQLVETGGGLVQPKGSLKLSCAVSAFTFTTYAMNWVRQAPGKGLEWVARIRNKSNNYATYY
ADHVKDRFTISRDDSQSMLYLQMNNLKIEDTAMYYCVFYYDYVYWGQGTLVTVSA
>Heavy Chain of SC16.67 IgG histidine scanning variant #27
(SEQ ID NO: 565)
EVQLVETGGGLVQPKGSLKLSCAVSAFTFTTYAMNWVRQAPGKGLEWVARIRNKSNNYATYY
ADSHKDRFTISRDDSQSMLYLQMNNLKIEDTAMYYCVFYYDYVYWGQGTLVTVSA
>Heavy Chain of SC16.67 IgG histidine scanning variant #28
(SEQ ID NO: 566)
EVQLVETGGGLVQPKGSLKLSCAVSAFTFTTYAMNWVRQAPGKGLEWVARIRNKSNNYATYY
ADSVHDRFTISRDDSQSMLYLQMNNLKIEDTAMYYCVFYYDYVYWGQGTLVTVSA
>Heavy Chain of SC16.67 IgG histidine scanning variant #29
(SEQ ID NO: 567)
EVQLVETGGGLVQPKGSLKLSCAVSAFTFTTYAMNWVRQAPGKGLEWVARIRNKSNNYATYY
ADSVKHRFTISRDDSQSMLYLQMNNLKIEDTAMYYCVFYYDYVYWGQGTLVTVSA
>Heavy Chain of SC16.67 IgG histidine scanning variant #30
(SEQ ID NO: 568)
EVQLVETGGGLVQPKGSLKLSCAVSAFTFTTYAMNWVRQAPGKGLEWVARIRNKSNNYATYY
ADSVKDRFTISRDDSQSMLYLQMNNLKIEDTAMYYCHFYYDYVYWGQGTLVTVSA
>Heavy Chain of SC16.67 IgG histidine scanning variant #31
(SEQ ID NO: 569)
EVQLVETGGGLVQPKGSLKLSCAVSAFTFTTYAMNWVRQAPGKGLEWVARIRNKSNNYATYY
ADSVKDRFTISRDDSQSMLYLQMNNLKIEDTAMYYCVHYYDYVYWGQGTLVTVSA
>Heavy Chain of SC16.67 IgG histidine scanning variant #32
(SEQ ID NO: 570)
EVQLVETGGGLVQPKGSLKLSCAVSAFTFTTYAMNWVRQAPGKGLEWVARIRNKSNNYATYY
ADSVKDRFTISRDDSQSMLYLQMNNLKIEDTAMYYCVFHYDYVYWGQGTLVTVSA
>Heavy Chain of SC16.67 IgG histidine scanning variant #33
(SEQ ID NO: 571)
EVQLVETGGGLVQPKGSLKLSCAVSAFTFTTYAMNWVRQAPGKGLEWVARIRNKSNNYATYY
ADSVKDRFTISRDDSQSMLYLQMNNLKIEDTAMYYCVFYHDYVYWGQGTLVTVSA
>Heavy Chain of SC16.67 IgG histidine scanning variant #34
(SEQ ID NO: 572)
EVQLVETGGGLVQPKGSLKLSCAVSAFTFTTYAMNWVRQAPGKGLEWVARIRNKSNNYATYY
ADSVKDRFTISRDDSQSMLYLQMNNLKIEDTAMYYCVFYYHYVYWGQGTLVTVSA
>Heavy Chain of SC16.67 IgG histidine scanning variant #35
(SEQ ID NO: 573)
EVQLVETGGGLVQPKGSLKLSCAVSAFTFTTYAMNWVRQAPGKGLEWVARIRNKSNNYATYY
ADSVKDRFTISRDDSQSMLYLQMNNLKIEDTAMYYCVFYYDHVYWGQGTLVTVSA
>Heavy Chain of SC16.67 IgG histidine scanning variant #36
(SEQ ID NO: 574)
EVQLVETGGGLVQPKGSLKLSCAVSAFTFTTYAMNWVRQAPGKGLEWVARIRNKSNNYATYY
ADSVKDRFTISRDDSQSMLYLQMNNLKIEDTAMYYCVFYYDYHYWGQGTLVTVSA
>Heavy Chain of SC16.67 IgG histidine scanning variant #37
(SEQ ID NO: 575)
EVQLVETGGGLVQPKGSLKLSCAVSAFTFTTYAMNWVRQAPGKGLEWVARIRNKSNNYATYY
ADSVKDRFTISRDDSQSMLYLQMNNLKIEDTAMYYCVFYYDYVHWGQGTLVTVSA
>Light Chain of SC16.67 IgG histidine scanning variant #1
(SEQ ID NO: 576)
QAVVTQESALTTSPGETVTLTCHSSTGAVTTSNYANWIQEKPDHLFTGLIGGTNNRAPGVPARFS
GSLIGDKAALTITGAQTEDEAIYFCGLWYSNHLVFGGGTKLTVL
>Light Chain of SC16.67 IgG histidine scanning variant #2
(SEQ ID NO: 577)
QAVVTQESALTTSPGETVTLTCRHSTGAVTTSNYANWIQEKPDHLFTGLIGGTNNRAPGVPARFS
GSLIGDKAALTITGAQTEDEAIYFCGLWYSNHLVFGGGTKLTVL
>Light Chain of SC16.67 IgG histidine scanning variant #3
(SEQ ID NO: 578)
QAVVTQESALTTSPGETVTLTCRSHTGAVTTSNYANWIQEKPDHLFTGLIGGTNNRAPGVPARFS
GSLIGDKAALTITGAQTEDEAIYFCGLWYSNHLVFGGGTKLTVL
>Light Chain of SC16.67 IgG histidine scanning variant #4
(SEQ ID NO: 579)
QAVVTQESALTTSPGETVTLTCRSSHGAVTTSNYANWIQEKPDHLFTGLIGGTNNRAPGVPARFS
GSLIGDKAALTITGAQTEDEAIYFCGLWYSNHLVFGGGTKLTVL
>Light Chain of SC16.67 IgG histidine scanning variant #5
(SEQ ID NO: 580)
QAVVTQESALTTSPGETVTLTCRSSTHAVTTSNYANWIQEKPDHLFTGLIGGTNNRAPGVPARFS
GSLIGDKAALTITGAQTEDEAIYFCGLWYSNHLVFGGGTKLTVL
>Light Chain of SC16.67 IgG histidine scanning variant #6
(SEQ ID NO: 581)
QAVVTQESALTTSPGETVTLTCRSSTGHVTTSNYANWIQEKPDHLFTGLIGGTNNRAPGVPARFS
GSLIGDKAALTITGAQTEDEAIYFCGLWYSNHLVFGGGTKLTVL
>Light Chain of SC16.67 IgG histidine scanning variant #7
(SEQ ID NO: 582)
QAVVTQESALTTSPGETVTLTCRSSTGAHTTSNYANWIQEKPDHLFTGLIGGTNNRAPGVPARFS
GSLIGDKAALTITGAQTEDEAIYFCGLWYSNHLVFGGGTKLTVL
>Light Chain of SC16.67 IgG histidine scanning variant #8
(SEQ ID NO: 583)
QAVVTQESALTTSPGETVTLTCRSSTGAVHTSNYANWIQEKPDHLFTGLIGGTNNRAPGVPARFS
GSLIGDKAALTITGAQTEDEAIYFCGLWYSNHLVFGGGTKLTVL
>Light Chain of SC16.67 IgG histidine scanning variant #9
(SEQ ID NO: 584)
QAVVTQESALTTSPGETVTLTCRSSTGAVTHSNYANWIQEKPDHLFTGLIGGTNNRAPGVPARFS
GSLIGDKAALTITGAQTEDEAIYFCGLWYSNHLVFGGGTKLTVL
>Light Chain of SC16.67 IgG histidine scanning variant #10
(SEQ ID NO: 585)
QAVVTQESALTTSPGETVTLTCRSSTGAVTTHNYANWIQEKPDHLFTGLIGGTNNRAPGVPARFS
GSLIGDKAALTITGAQTEDEAIYFCGLWYSNHLVFGGGTKLTVL
>Light Chain of SC16.67 IgG histidine scanning variant #11
(SEQ ID NO: 586)
QAVVTQESALTTSPGETVTLTCRSSTGAVTTSHYANWIQEKPDHLFTGLIGGTNNRAPGVPARFS
GSLIGDKAALTITGAQTEDEAIYFCGLWYSNHLVFGGGTKLTVL
>Light Chain of SC16.67 IgG histidine scanning variant #12
(SEQ ID NO: 587)
QAVVTQESALTTSPGETVTLTCRSSTGAVTTSNHANWIQEKPDHLFTGLIGGTNNRAPGVPARFS
GSLIGDKAALTITGAQTEDEAIYFCGLWYSNHLVFGGGTKLTVL
>Light Chain of SC16.67 IgG histidine scanning variant #13
(SEQ ID NO: 588)
QAVVTQESALTTSPGETVTLTCRSSTGAVTTSNYHNWIQEKPDHLFTGLIGGTNNRAPGVPARFS
GSLIGDKAALTITGAQTEDEAIYFCGLWYSNHLVFGGGTKLTVL
>Light Chain of SC16.67 IgG histidine scanning variant #14
(SEQ ID NO: 589)
QAVVTQESALTTSPGETVTLTCRSSTGAVTTSNYAHWIQEKPDHLFTGLIGGTNNRAPGVPARFS
GSLIGDKAALTITGAQTEDEAIYFCGLWYSNHLVFGGGTKLTVL
>Light Chain of SC16.67 IgG histidine scanning variant #15
(SEQ ID NO: 590)
QAVVTQESALTTSPGETVTLTCRSSTGAVTTSNYANWIQEKPDHLFTGLIGHTNNRAPGVPARFS
GSLIGDKAALTITGAQTEDEAIYFCGLWYSNHLVFGGGTKLTVL
>Light Chain of SC16.67 IgG histidine scanning variant #16
(SEQ ID NO: 591)
QAVVTQESALTTSPGETVTLTCRSSTGAVTTSNYANWIQEKPDHLFTGLIGGHNNRAPGVPARFS
GSLIGDKAALTITGAQTEDEAIYFCGLWYSNHLVFGGGTKLTVL
>Light Chain of SC16.67 IgG histidine scanning variant #17
(SEQ ID NO: 592)
QAVVTQESALTTSPGETVTLTCRSSTGAVTTSNYANWIQEKPDHLFTGLIGGTHNRAPGVPARFS
GSLIGDKAALTITGAQTEDEAIYFCGLWYSNHLVFGGGTKLTVL
>Light Chain of SC16.67 IgG histidine scanning variant #18
(SEQ ID NO: 593)
QAVVTQESALTTSPGETVTLTCRSSTGAVTTSNYANWIQEKPDHLFTGLIGGTNHRAPGVPARFS
GSLIGDKAALTITGAQTEDEAIYFCGLWYSNHLVFGGGTKLTVL
>Light Chain of SC16.67 IgG histidine scanning variant #19
(SEQ ID NO: 594)
QAVVTQESALTTSPGETVTLTCRSSTGAVTTSNYANWIQEKPDHLFTGLIGGTNNHAPGVPARFS
GSLIGDKAALTITGAQTEDEAIYFCGLWYSNHLVFGGGTKLTVL
>Light Chain of SC16.67 IgG histidine scanning variant #20
(SEQ ID NO: 595)
QAVVTQESALTTSPGETVTLTCRSSTGAVTTSNYANWIQEKPDHLFTGLIGGTNNRHPGVPARFS
GSLIGDKAALTITGAQTEDEAIYFCGLWYSNHLVFGGGTKLTVL
>Light Chain of SC16.67 IgG histidine scanning variant #21
(SEQ ID NO: 596)
QAVVTQESALTTSPGETVTLTCRSSTGAVTTSNYANWIQEKPDHLFTGLIGGTNNRAHGVPARFS
GSLIGDKAALTITGAQTEDEAIYFCGLWYSNHLVFGGGTKLTVL
>Light Chain of SC16.67 IgG histidine scanning variant #22
(SEQ ID NO: 597)
QAVVTQESALTTSPGETVTLTCRSSTGAVTTSNYANWIQEKPDHLFTGLIGGTNNRAPGVPARFS
GSLIGDKAALTITGAQTEDEAIYFCHLWYSNHLVFGGGTKLTVL
>Light Chain of SC16.67 IgG histidine scanning variant #23
(SEQ ID NO: 598)
QAVVTQESALTTSPGETVTLTCRSSTGAVTTSNYANWIQEKPDHLFTGLIGGTNNRAPGVPARFS
GSLIGDKAALTITGAQTEDEAIYFCGHWYSNHLVFGGGTKLTVL
>Light Chain of SC16.67 IgG histidine scanning variant #24
(SEQ ID NO: 599)
QAVVTQESALTTSPGETVTLTCRSSTGAVTTSNYANWIQEKPDHLFTGLIGGTNNRAPGVPARFS
GSLIGDKAALTITGAQTEDEAIYFCGLHYSNHLVFGGGTKLTVL
>Light Chain of SC16.67 IgG histidine scanning variant #25
(SEQ ID NO: 600)
QAVVTQESALTTSPGETVTLTCRSSTGAVTTSNYANWIQEKPDHLFTGLIGGTNNRAPGVPARFS
GSLIGDKAALTITGAQTEDEAIYFCGLWHSNHLVFGGGTKLTVL
>Light Chain of SC16.67 IgG histidine scanning variant #26
(SEQ ID NO: 601)
QAVVTQESALTTSPGETVTLTCRSSTGAVTTSNYANWIQEKPDHLFTGLIGGTNNRAPGVPARFS
GSLIGDKAALTITGAQTEDEAIYFCGLWYHNHLVFGGGTKLTVL
>Light Chain of SC16.67 IgG histidine scanning variant #27
(SEQ ID NO: 602)
QAVVTQESALTTSPGETVTLTCRSSTGAVTTSNYANWIQEKPDHLFTGLIGGTNNRAPGVPARFS
GSLIGDKAALTITGAQTEDEAIYFCGLWYSHHLVFGGGTKLTVL
>Light Chain of SC16.67 IgG histidine scanning variant #28
(SEQ ID NO: 603)
QAVVTQESALTTSPGETVTLTCRSSTGAVTTSNYANWIQEKPDHLFTGLIGGTNNRAPGVPARFS
GSLIGDKAALTITGAQTEDEAIYFCGLWYSNALVFGGGTKLTVL
>Light Chain of SC16.67 IgG histidine scanning variant #29
(SEQ ID NO: 604)
QAVVTQESALTTSPGETVTLTCRSSTGAVTTSNYANWIQEKPDHLFTGLIGGTNNRAPGVPARFS
GSLIGDKAALTITGAQTEDEAIYFCGLWYSNHHVFGGGTKLTVL
>Light Chain of SC16.67 IgG histidine scanning variant #30
(SEQ ID NO: 605)
QAVVTQESALTTSPGETVTLTCRSSTGAVTTSNYANWIQEKPDHLFTGLIGGTNNRAPGVPARFS
GSLIGDKAALTITGAQTEDEAIYFCGLWYSNHLHFGGGTKLTVL
>Humani#ed VH variant #1
(SEQ ID NO: 606)
EVQLVESGGGLVQPGGSLRLSCAASGFNISYYYIGWVRRAPGKGEELVARIYPTNGYTRYADSV
KGRFTISADTSKNTAYLQMNSLRAEDTAVYYCARAYGDSDHYSEAIDYSGQGTLVTVSS
>Humani#ed VH variant #2
(SEQ ID NO: 607)
EVQLVESGGGLVQPGGSLRLSCAASGFNIYSESIGWVRRAPGKGEELVARIYPTNGYTRYADSVK
GRFTISADTSKNTAYLQMNSLRAEDTAVYYCARSYYSHYDGHYHYYGLDYSGQGTLVTVSS
>Humani#ed VH variant #3
(SEQ ID NO: 608)
EVQLVESGGGLVQPGGSLRLSCAASGFNISYYSIGWVRRAPGKGEELVARIYPTNGYTRYADSV
KGRFTISADTSKNTAYLQMNSLRAEDTAVYYCARYHHSEYSDYYGYYSEYGFDYSGQGTLVTV
RS
>Humani#ed VH variant #4
(SEQ ID NO: 609)
EVQLVESGGGLVQPGGSLRLSCAASGFNIYSYSIGWVRRAPGKGEELVARIYPTNGYTRYADSV
KGRFTISADTSKNTAYLQMNSLRAEDTAVYYCAREHYHGYYDGAHYYALDYSGQGTLVTVSS
>Humani#ed VH variant #5
(SEQ ID NO: 610)
EVQLVESGGGLVQPGGSLRLSCAASGFNIEYYSIGWVRRAPGKGEELVARIYPTNGYTRYADSV
KGRFTISADTSKNTAYLQMNSLRAEDTAVYYCAREYYSYHDEYEYDYALDYSGQGTLVTVSS
>Humani#ed VH variant #6
(SEQ ID NO: 611)
EVQLVESGGGLVQPGGSLRLSCAASGFNIEHYSIGWVRRAPGKGEELVARIYPTNGYTRYADSV
KGRFTISADTSKNTAYLQMNSLRAEDTAVYYCARHHYYGYHSGYHHYAIDYSGQGTLVTVSS
>Humani#ed VH variant #7
(SEQ ID NO: 612)
EVQLVESGGGLVQPGGSLRLSCAASGFNISSSDIGWVRRAPGKGEELVARIYPTNGYTRYADSVK
GRFTISADTSKNTAYLQMNSLRAEDTAVYYCARYYYYDDDGYYYEHAIDYSGQGTLVTVSS
>Humani#ed VH variant #8
(SEQ ID NO: 613)
EVQLVESGGGLVQPGGSLRLSCAASGFNIEYESIGWVRRAPGKGEELVARIYPTNGYTRYADSV
KGRFTISADTSKNTAYLQMNSLRAEDTAVYYCARSEYSHYSGSHHYYALDYSGQGTLVTVSS
>Humani#ed VH variant #9
(SEQ ID NO: 614)
EVQLVESGGGLVQPGGSLRLSCAASGFNISEHSIGWVRRAPGKGEELVARIYPTNGYTRYADSVK
GRFTISADTSKNTAYLQMNSLRAEDTAVYYCARSYYHGYSHGHHYYAIDYSGQGTLVTVSS
>Humani#ed VH variant #10
(SEQ ID NO: 615)
EVQLVESGGGLVQPGGSLRLSCAASGFNIHSYYIGWVRRAPGKGEELVARTYPTNGYTRYADSV
KGRFTISADTSKNTAYLQMNSLRAEDTAVYYCARGYYGHEYDYHYDYYGGGFDYSGQGTLVT
VSS
>Humani#ed VH variant #11
(SEQ ID NO: 616)
EVQLVESGGGLVQPGGSLRLSCAASGFNIHYEEIGWVRRAPGKGEELVARTYPTNGYTRYADSV
KGRFTISADTSKNTAYLQMNSLRAEDTAVYYCARYSYYYHYGGGMDYSGQGTLVTVSS
>Humani#ed VH variant #12
(SEQ ID NO: 617)
EVQLVESGGLVQPGGSLRLSCAASGFNIESSYIGWVRRAPGKGEELVARIYPTNGYTRYADSVKG
RFTISADTSKNTAYLQMNSLRAEDTAVYYCARYDEYDGYYYEAMDYSGQGTLVTVSS
>Humani#ed VH variant #13
(SEQ ID NO: 618)
EVQLVESGGGLVQPGGSLRLSCAASGFNISEESIGWVRRAPGKGEELVARTYPTNGYTRYADSVK
GRFTISADTSKNTAYLQMNSLRAEDTAVYYCARSYYAHYSAGYYYYALDYSGQGTLVTVSS
>Humani#ed VH variant #14
(SEQ ID NO: 619)
EVQLVESGGGLVQPGGSLRLSCAASGFNISHYSIGWVRHAPGKGEELVARTYPTNGYTRYADSV
KGRFTISADTSKNTAYLQMNSLRAEDTAVYYCARFIHYSHYDGHSHYYGLDYSGQGTLVTVSS
>Humani#ed VH variant #15
(SEQ ID NO: 620)
EVQLVESGGGLVQPGGSLRLSCAASGFNIYDHSIGWVRRAPGKGEELVARTYPTNGYTRYADSV
KGRFTISADTSKNTAYLQMNSLRAEDTAVYYCARSSYSGYYGSFIHYYALDYSGQGTLVTVSS
>Trastuzumab (4D5) Light Chain
(SEQ ID NO: 621)
DIQMTQSPSSLSASVGDRVTITCRASQDVNTAVAWYQQKPGKAPKWYSASFLYSGVPSRFSGS
RSGTDFTLTISSLQPEDFATYYCQQHYTTPPTFGQGTKVEIK
>Heavy Chain CDR1 of SC16.4 IgG
(SEQ ID NO: 622)
GYTFTDYSMH
>Heavy Chain CDR2 of SC16.4 IgG
(SEQ ID NO: 623)
WINTETGEPGYADDFKG
>Heavy Chain CDR3 of SC16.4 IgG
(SEQ ID NO: 624)
ARYDGYAMDY
>Light Chain CDR1 of SC16.4 IgG
(SEQ ID NO: 625)
RASQDISNYLN
>Light Chain CDR2 of SC16.4 IgG
(SEQ ID NO: 626)
YTSRLHS
>Light Chain CDR3 of SC16.4 IgG
(SEQ ID NO: 627)
QQGDMLPWT
>Heavy Chain CDR1 of hSC16.13 IgG
(SEQ ID NO: 628)
GFSLSTSGMGVG
>Heavy Chain CDR2 of hSC16.13 IgG
(SEQ ID NO: 629)
HIWWDDVKRYSPSLKS
>Heavy Chain CDR3 of hSC16.13 IgG
(SEQ ID NO: 630)
ARIVSFDNDVVSAMDY
>Light Chain CDR1 of hSC16.13 IgG
(SEQ ID NO: 631)
SASSSVSYMY
>Light Chain CDR2 of hSC16.13 IgG
(SEQ ID NO: 632)
LTSNLAS
>Light Chain CDR3 of hSC16.13 IgG
(SEQ ID NO: 633)
QQWRSNPFT
>Heavy Chain CDR1 of hSC16.15 IgG
(SEQ ID NO: 634)
KASGYTFTRYWIH
>Heavy Chain CDR2 of hSC16.15 IgG
(SEQ ID NO: 635)
YINPTTVYTEFNQNFKD
>Heavy Chain CDR3 of hSC16.15 IgG
(SEQ ID NO: 636)
ARGGSNFFDY
>Light Chain CDR1 of hSC16.15 IgG
(SEQ ID NO: 637)
ENIYYNLA
>Light Chain CDR2 of hSC16.15 IgG
(SEQ ID NO: 638)
TANSLED
>Light Chain CDR3 of hSC16.15 IgG
(SEQ ID NO: 639)
KQAYDVPPT
>Heavy Chain CDR1 of hSC16.25 IgG
(SEQ ID NO: 640)
GFSLSTSGMGVG
>Heavy Chain CDR2 of hSC16.25 IgG
(SEQ ID NO: 641)
DIWWDDNKYYNPSLKS
>Heavy Chain CDR3 of hSC16.25 IgG
(SEQ ID NO: 642)
ARRVNYYYDPYYAMDY
>Light Chain CDR1 of hSC16.25 IgG
(SEQ ID NO: 643)
SSVSYMH
>Light Chain CDR2 of hSC16.25 IgG
(SEQ ID NO: 644)
DSSKLAS
>Light Chain CDR3 of hSC16.25 IgG
(SEQ ID NO: 645)
QQWSSNPLT
>Heavy Chain CDR1 of hSC16.34 IgG
(SEQ ID NO: 646)
KASGYTFTNYGMN
>Heavy Chain CDR2 of hSC16.34 IgG
(SEQ ID NO: 647)
WINTYTGDPTYADDFKG
>Heavy Chain CDR3 of hSC16.34 IgG
(SEQ ID NO: 648)
ARIGGNSPSDY
>Light Chain CDR1 of hSC16.34 IgG
(SEQ ID NO: 649)
QSVSNDVA
>Light Chain CDR2 of hSC16.34 IgG
(SEQ ID NO: 650)
YASNRYS
>Light Chain CDR3 of hSC16.34 IgG
(SEQ ID NO: 651)
QQDYSSPWT
>Heavy Chain CDR1 of SC16.67 IgG
(SEQ ID NO: 652)
AFTFTTYAMN
>Heavy Chain CDR2 of SC16.67 IgG
(SEQ ID NO: 653)
RIRNKSNNYATYYADSVKD
>Heavy Chain CDR3 of SC16.67 IgG
(SEQ ID NO: 654)
VFYYDYVY
>Light Chain CDR1 of SC16.67 IgG
(SEQ ID NO: 655)
RSSTGAVTTSNYAN
>Light Chain CDR2 of SC16.67 IgG
(SEQ ID NO: 656)
GTNNRAP
>Light Chain CDR3 of SC16.67 IgG
(SEQ ID NO: 657)
GLWYSNHLV

The application's sequence listing, which the Patent Office published only in electronic form, follows.

SEQUENCE LISTING (657 sequences)

SEQ ID NO: 1 - protein, 118 aa, Artificial Sequence
  source: /note="Description of Artificial Sequence: Synthetic polypeptide"
  source: /note="Heavy Chain of Rovalpituzumab IgG"
QVQLVQSGAEVKKPGASVKVSCKASGYTFTNYGMNWVRQAPGQGLEWMGWINTYTGEPTYADDFKGRVTMTTDTSTSTAYMELRSLRSDDTAVYYCARIGDSSPSDYWGQGTLVTVSS

SEQ ID NO: 2 - protein, 107 aa, Artificial Sequence
  source: /note="Description of Artificial Sequence: Synthetic polypeptide"
  source: /note="Light Chain of Rovalpituzumab IgG"
EIVMTQSPATLSVSPGERATLSCKASQSVSNDVVWYQQKPGQAPRLLIYYASNRYTGIPARFSGSGSGTEFTLTISSLQSEDFAVYYCQQDYTSPWTFGQGTKLEIK

SEQ ID NO: 3 - protein, 13 aa, Artificial Sequence
  source: /note="Description of Artificial Sequence: Synthetic peptide"
  source: /note="Heavy Chain CDR1 of Rovalpituzumab"
KASGYTFTNYGMN

SEQ ID NO: 4 - protein, 17 aa, Artificial Sequence
  source: /note="Description of Artificial Sequence: Synthetic peptide"
  source: /note="Heavy Chain CDR2 of Rovalpituzumab"
WINTYTGEPTYADDFKG

SEQ ID NO: 5 - protein, 11 aa, Artificial Sequence
  source: /note="Description of Artificial Sequence: Synthetic peptide"
  source: /note="Heavy Chain CDR3 of Rovalpituzumab"
ARIGDSSPSDY

SEQ ID NO: 6 - protein, 11 aa, Artificial Sequence
  source: /note="Description of Artificial Sequence: Synthetic peptide"
  source: /note="Light Chain CDR1 of Rovalpituzumab"
KASQSVSNDVV

SEQ ID NO: 7 - protein, 7 aa, Artificial Sequence
  source: /note="Description of Artificial Sequence: Synthetic peptide"
  source: /note="Light Chain CDR2 of Rovalpituzumab"
YASNRYT

SEQ ID NO: 8 - protein, 8 aa, Artificial Sequence
  source: /note="Description of Artificial Sequence: Synthetic peptide"
  source: /note="Light Chain CDR3 of Rovalpituzumab"
QQDYTSPW

SEQ ID NO: 9 - protein, 592 aa, Homo sapiens
  source: /note="Mature Human DLL3"
AGVFELQIHSFGPGPGPGAPRSPCSARLPCRLFFRVCLKPGLSEEAAESPCALGAALSARGPVYTEQPGAPAPDLPLPDGLLQVPFRDAWPGTFSFIIETWREELGDQIGGPAWSLLARVAGRRRLAAGGPWARDIQRAGAWELRFSYRARCEPPAVGTACTRLCRPRSAPSRCGPGLRPCAPLEDECEAPLVCRAGCSPEHGFCEQPGECRCLEGWTGPLCTVPVSTSSCLSPRGPSSATTGCLVPGPGPCDGNPCANGGSCSETPRSFECTCPRGFYGLRCEVSGVTCADGPCFNGGLCVGGADPDSAYICHCPPGFQGSNCEKRVDRCSLQPCRNGGLCLDLGHALRCRCRAGFAGPRCEHDLDDCAGRACANGGTCVEGGGAHRCSCALGFGGRDCRERADPCAARPCAHGGRCYAHFSGLVCACAPGYMGARCEFPVHPDGASALPAAPPGLRPGDPQRYLLPPALGLLVAAGVAGAALLLVHVRRRGHSQDAGSRLLAGTPEPSVHALPDALNNLRTQEGSGDGPSSSVDWNRPEDVDPQGIYVISAPSIYAREVATPLFPPLHTGRAGQRQHLLFPYPSSILSVK

SEQ ID NO: 10 - DNA, 1776 bp, Homo sapiens
  source: /note="cDNA Encoding Mature Human DLL3"
gctggcgtcttcgagctgcagatccactctttcgggccgggtccaggccctggggccccgcggtccccctgcagcgcccggctcccctgccgcctcttcttcagagtctgcctgaagcctgggctctcagaggaggccgccgagtccccgtgcgccctgggcgcggcgctgagtgcgcgcggaccggtctacaccgagcagcccggagcgcccgcgcctgatctcccactgcccgacggcctcttgcaggtgcccttccgggacgcctggcctggcaccttctctttcatcatcgaaacctggagagaggagttaggagaccagattggagggcccgcctggagcctgctggcgcgcgtggctggcaggcggcgcttggcagccggaggcccgtgggcccgggacattcagcgcgcaggcgcctgggagctgcgcttctcgtaccgcgcgcgctgcgagccgcctgccgtcgggaccgcgtgcacgcgcctctgccgtccgcgcagcgccccctcgcggtgcggtccgggactgcgcccctgcgcaccgctcgaggacgaatgtgaggcgccgctggtgtgccgagcaggctgcagccctgagcatggcttctgtgaacagcccggtgaatgccgatgcctagagggctggactggacccctctgcacggtccctgtctccaccagcagctgcctcagccccaggggcccgtcctctgctaccaccggatgccttgtccctgggcctgggccctgtgacgggaacccgtgtgccaatggaggcagctgtagtgagacacccaggtcctttgaatgcacctgcccgcgtgggttctacgggctgcggtgtgaggtgagcggggtgacatgtgcagatggaccctgcttcaacggcggcttgtgtgtcgggggtgcagaccctgactctgcctacatctgccactgcccacccggtttccaaggctccaactgtgagaagagggtggaccggtgcagcctgcagccatgccgcaatggcggactctgcctggacctgggccacgccctgcgctgccgctgccgcgccggcttcgcgggtcctcgctgcgagcacgacctggacgactgcgcgggccgcgcctgcgctaacggcggcacgtgtgtggagggcggcggcgcgcaccgctgctcctgcgcgctgggcttcggcggccgcgactgccgcgagcgcgcggacccgtgcgccgcgcgcccctgtgctcacggcggccgctgctacgcccacttctccggcctcgtctgcgcttgcgctcccggctacatgggagcgcggtgtgagttcccagtgcaccccgacggcgcaagcgccttgcccgcggccccgccgggcctcaggcccggggaccctcagcgctaccttttgcctccggctctgggactgctcgtggccgcgggcgtggccggcgctgcgctcttgctggtccacgtgcgccgccgtggccactcccaggatgctgggtctcgcttgctggctgggaccccggagccgtcagtccacgcactcccggatgcactcaacaacctaaggacgcaggagggttccggggatggtccgagctcgtccgtagattggaatcgccctgaagatgtagaccctcaagggatttatgtcatatctgctccttccatctacgctcgggaggtagcgacgccccttttccccccgctacacactgggcgcgctgggcagaggcagcacctgctttttccctacccttcctcgattctgtccgtgaaa

SEQ ID NO: 11 - protein, 466 aa, Homo sapiens
  source: /note="Extracellular Domain of DLL3"
AGVFELQIHSFGPGPGPGAPRSPCSARLPCRLFFRVCLKPGLSEEAAESPCALGAALSARGPVYTEQPGAPAPDLPLPDGLLQVPFRDAWPGTFSFIIETWREELGDQIGGPAWSLLARVAGRRRLAAGGPWARDIQRAGAWELRFSYRARCEPPAVGTACTRLCRPRSAPSRCGPGLRPCAPLEDECEAPLVCRAGCSPEHGFCEQPGECRCLEGWTGPLCTVPVSTSSCLSPRGPSSATTGCLVPGPGPCDGNPCANGGSCSETPRSFECTCPRGFYGLRCEVSGVTCADGPCFNGGLCVGGADPDSAYICHCPPGFQGSNCEKRVDRCSLQPCRNGGLCLDLGHALRCRCRAGFAGPRCEHDLDDCAGRACANGGTCVEGGGAHRCSCALGFGGRDCRERADPCAARPCAHGGRCYAHFSGLVCACAPGYMGARCEFPVHPDGASALPAAPPGLRPGDPQRYL

SEQ ID NO: 12 - DNA, 1398 bp, Homo sapiens
  source: /note="cDNA Encoding Extracellular Domain of DLL3"
gctggcgtcttcgagctgcagatccactctttcgggccgggtccaggccctggggccccgcggtccccctgcagcgcccggctcccctgccgcctcttcttcagagtctgcctgaagcctgggctctcagaggaggccgccgagtccccgtgcgccctgggcgcggcgctgagtgcgcgcggaccggtctacaccgagcagcccggagcgcccgcgcctgatctcccactgcccgacggcctcttgcaggtgcccttccgggacgcctggcctggcaccttctctttcatcatcgaaacctggagagaggagttaggagaccagattggagggcccgcctggagcctgctggcgcgcgtggctggcaggcggcgcttggcagccggaggcccgtgggcccgggacattcagcgcgcaggcgcctgggagctgcgcttctcgtaccgcgcgcgctgcgagccgcctgccgtcgggaccgcgtgcacgcgcctctgccgtccgcgcagcgccccctcgcggtgcggtccgggactgcgcccctgcgcaccgctcgaggacgaatgtgaggcgccgctggtgtgccgagcaggctgcagccctgagcatggcttctgtgaacagcccggtgaatgccgatgcctagagggctggactggacccctctgcacggtccctgtctccaccagcagctgcctcagccccaggggcccgtcctctgctaccaccggatgccttgtccctgggcctgggccctgtgacgggaacccgtgtgccaatggaggcagctgtagtgagacacccaggtcctttgaatgcacctgcccgcgtgggttctacgggctgcggtgtgaggtgagcggggtgacatgtgcagatggaccctgcttcaacggcggcttgtgtgtcgggggtgcagaccctgactctgcctacatctgccactgcccacccggtttccaaggctccaactgtgagaagagggtggaccggtgcagcctgcagccatgccgcaatggcggactctgcctggacctgggccacgccctgcgctgccgctgccgcgccggcttcgcgggtcctcgctgcgagcacgacctggacgactgcgcgggccgcgcctgcgctaacggcggcacgtgtgtggagggcggcggcgcgcaccgctgctcctgcgcgctgggcttcggcggccgcgactgccgcgagcgcgcggacccgtgcgccgcgcgcccctgtgctcacggcggccgctgctacgcccacttctccggcctcgtctgcgcttgcgctcccggctacatgggagcgcggtgtgagttcccagtgcaccccgacggcgcaagcgccttgcccgcggccccgccgggcctcaggcccggggaccctcagcgctacctt

SEQ ID NO: 13 - protein, 118 aa, Artificial Sequence
  source: /note="Description of Artificial Sequence: Synthetic polypeptide"
  source: /note="Heavy Chain of Rovalpituzumab IgG histidine scanning variant #1"
QVQLVQSGAEVKKPGASVKVSCHASGYTFTNYGMNWVRQAPGQGLEWMGWINTYTGEPTYADDFKGRVTMTTDTSTSTAYMELRSLRSDDTAVYYCARIGDSSPSDYWGQGTLVTVSS

SEQ ID NO: 14 - protein, 118 aa, Artificial Sequence
  source: /note="Description of Artificial Sequence: Synthetic polypeptide"
  source: /note="Heavy Chain of Rovalpituzumab IgG histidine scanning variant #2"
QVQLVQSGAEVKKPGASVKVSCKHSGYTFTNYGMNWVRQAPGQGLEWMGWINTYTGEPTYADDFKGRVTMTTDTSTSTAYMELRSLRSDDTAVYYCARIGDSSPSDYWGQGTLVTVSS

SEQ ID NO: 15 - protein, 118 aa, Artificial Sequence
  source: /note="Description of Artificial Sequence: Synthetic polypeptide"
  source: /note="Heavy Chain of Rovalpituzumab IgG histidine scanning variant #3"
QVQLVQSGAEVKKPGASVKVSCKAHGYTFTNYGMNWVRQAPGQGLEWMGWINTYTGEPTYADDFKGRVTMTTDTSTSTAYMELRSLRSDDTAVYYCARIGDSSPSDYWGQGTLVTVSS

SEQ ID NO: 16 - protein, 118 aa, Artificial Sequence
  source: /note="Description of Artificial Sequence: Synthetic polypeptide"
  source: /note="Heavy Chain of Rovalpituzumab IgG histidine scanning variant #4"
QVQLVQSGAEVKKPGASVKVSCKASHYTFTNYGMNWVRQAPGQGLEWMGWINTYTGEPTYADDFKGRVTMTTDTSTSTAYMELRSLRSDDTAVYYCARIGDSSPSDYWGQGTLVTVSS

SEQ ID NO: 17 - protein, 118 aa, Artificial Sequence
  source: /note="Description of Artificial Sequence: Synthetic polypeptide"
  source: /note="Heavy Chain of Rovalpituzumab IgG histidine scanning variant #5"
QVQLVQSGAEVKKPGASVKVSCKASGHTFTNYGMNWVRQAPGQGLEWMGWINTYTGEPTYADDFKGRVTMTTDTSTSTAYMELRSLRSDDTAVYYCARIGDSSPSDYWGQGTLVTVSS

SEQ ID NO: 18 - protein, 118 aa, Artificial Sequence
  source: /note="Description of Artificial Sequence: Synthetic polypeptide"
  source: /note="Heavy Chain of Rovalpituzumab IgG histidine scanning variant #6"
QVQLVQSGAEVKKPGASVKVSCKASGYHFTNYGMNWVRQAPGQGLEWMGWINTYTGEPTYADDFKGRVTMTTDTSTSTAYMELRSLRSDDTAVYYCARIGDSSPSDYWGQGTLVTVSS

SEQ ID NO: 19 - protein, 118 aa, Artificial Sequence
  source: /note="Description of Artificial Sequence: Synthetic polypeptide"
  source: /note="Heavy Chain of Rovalpituzumab IgG histidine scanning variant #7"
QVQLVQSGAEVKKPGASVKVSCKASGYTHTNYGMNWVRQAPGQGLEWMGWINTYTGEPTYADDFKGRVTMTTDTSTSTAYMELRSLRSDDTAVYYCARIGDSSPSDYWGQGTLVTVSS

SEQ ID NO: 20 - protein, 118 aa, Artificial Sequence
  source: /note="Description of Artificial Sequence: Synthetic polypeptide"
  source: /note="Heavy Chain of Rovalpituzumab IgG histidine scanning variant #8"
QVQLVQSGAEVKKPGASVKVSCKASGYTFHNYGMNWVRQAPGQGLEWMGWINTYTGEPTYADDFKGRVTMTTDTSTSTAYMELRSLRSDDTAVYYCARIGDSSPSDYWGQGTLVTVSS

SEQ ID NO: 21 - protein, 118 aa, Artificial Sequence
  source: /note="Description of Artificial Sequence: Synthetic polypeptide"
  source: /note="Heavy Chain of Rovalpituzumab IgG histidine scanning variant #9"
QVQLVQSGAEVKKPGASVKVSCKASGYTFTHYGMNWVRQAPGQGLEWMGWINTYTGEPTYADDFKGRVTMTTDTSTSTAYMELRSLRSDDTAVYYCARIGDSSPSDYWGQGTLVTVSS

SEQ ID NO: 22 - protein, 118 aa, Artificial Sequence
  source: /note="Description of Artificial Sequence: Synthetic polypeptide"
  source: /note="Heavy Chain of Rovalpituzumab IgG histidine scanning variant #10"
QVQLVQSGAEVKKPGASVKVSCKASGYTFTNHGMNWVRQAPGQGLEWMGWINTYTGEPTYADDFKGRVTMTTDTSTSTAYMELRSLRSDDTAVYYCARIGDSSPSDYWGQGTLVTVSS

SEQ ID NO: 23 - protein, 118 aa, Artificial Sequence
  source: /note="Description of Artificial Sequence: Synthetic polypeptide"
  source: /note="Heavy Chain of Rovalpituzumab IgG histidine scanning variant #11"
QVQLVQSGAEVKKPGASVKVSCKASGYTFTNYHMNWVRQAPGQGLEWMGWINTYTGEPTYADDFKGRVTMTTDTSTSTAYMELRSLRSDDTAVYYCARIGDSSPSDYWGQGTLVTVSS

SEQ ID NO: 24 - protein, 118 aa, Artificial Sequence
  source: /note="Description of Artificial Sequence: Synthetic polypeptide"
  source: /note="Heavy Chain of Rovalpituzumab IgG histidine scanning variant #12"
QVQLVQSGAEVKKPGASVKVSCKASGYTFTNYGHNWVRQAPGQGLEWMGWINTYTGEPTYADDFKGRVTMTTDTSTSTAYMELRSLRSDDTAVYYCARIGDSSPSDYWGQGTLVTVSS

SEQ ID NO: 25 - protein, 118 aa, Artificial Sequence
  source: /note="Description of Artificial Sequence: Synthetic polypeptide"
  source: /note="Heavy Chain of Rovalpituzumab IgG histidine scanning variant #13"
QVQLVQSGAEVKKPGASVKVSCKASGYTFTNYGMHWVRQAPGQGLEWMGWINTYTGEPTYADDFKGRVTMTTDTSTSTAYMELRSLRSDDTAVYYCARIGDSSPSDYWGQGTLVTVSS

SEQ ID NO: 26 - protein, 118 aa, Artificial Sequence
  source: /note="Description of Artificial Sequence: Synthetic polypeptide"
  source: /note="Heavy Chain of Rovalpituzumab IgG histidine scanning variant #14"
QVQLVQSGAEVKKPGASVKVSCKASGYTFTNYGMNWVRQAPGQGLEWMGHINTYTGEPTYADDFKGRVTMTTDTSTSTAYMELRSLRSDDTAVYYCARIGDSSPSDYWGQGTLVTVSS

SEQ ID NO: 27 - protein, 118 aa, Artificial Sequence
  source: /note="Description of Artificial Sequence: Synthetic polypeptide"
  source: /note="Heavy Chain of Rovalpituzumab IgG histidine scanning variant #15"
QVQLVQSGAEVKKPGASVKVSCKASGYTFTNYGMNWVRQAPGQGLEWMGWHNTYTGEPTYADDFKGRVTMTTDTSTSTAYMELRSLRSDDTAVYYCARIGDSSPSDYWGQGTLVTVSS

SEQ ID NO: 28 - protein, 118 aa, Artificial Sequence
  source: /note="Description of Artificial Sequence: Synthetic polypeptide"
  source: /note="Heavy Chain of Rovalpituzumab IgG histidine scanning variant #16"
QVQLVQSGAEVKKPGASVKVSCKASGYTFTNYGMNWVRQAPGQGLEWMGWIHTYTGEPTYADDFKGRVTMTTDTSTSTAYMELRSLRSDDTAVYYCARIGDSSPSDYWGQGTLVTVSS

SEQ ID NO: 29 - protein, 118 aa, Artificial Sequence
  source: /note="Description of Artificial Sequence: Synthetic polypeptide"
  source: /note="Heavy Chain of Rovalpituzumab IgG histidine scanning variant #17"
QVQLVQSGAEVKKPGASVKVSCKASGYTFTNYGMNWVRQAPGQGLEWMGWINHYTGEPTYADDFKGRVTMTTDTSTSTAYMELRSLRSDDTAVYYCARIGDSSPSDYWGQGTLVTVSS

SEQ ID NO: 30 - protein, 118 aa, Artificial Sequence
  source: /note="Description of Artificial Sequence: Synthetic polypeptide"
  source: /note="Heavy Chain of Rovalpituzumab IgG histidine scanning variant #18"
QVQLVQSGAEVKKPGASVKVSCKASGYTFTNYGMNWVRQAPGQGLEWMGWINTHTGEPTYADDFKGRVTMTTDTSTSTAYMELRSLRSDDTAVYYCARIGDSSPSDYWGQGTLVTVSS

SEQ ID NO: 31 - protein, 118 aa, Artificial Sequence
  source: /note="Description of Artificial Sequence: Synthetic polypeptide"
  source: /note="Heavy Chain of Rovalpituzumab IgG histidine scanning variant #19"
QVQLVQSGAEVKKPGASVKVSCKASGYTFTNYGMNWVRQAPGQGLEWMGWINTYHGEPTYADDFKGRVTMTTDTSTSTAYMELRSLRSDDTAVYYCARIGDSSPSDYWGQGTLVTVSS

SEQ ID NO: 32 - protein, 118 aa, Artificial Sequence
  source: /note="Description of Artificial Sequence: Synthetic polypeptide"
  source: /note="Heavy Chain of Rovalpituzumab IgG histidine scanning variant #20"
QVQLVQSGAEVKKPGASVKVSCKASGYTFTNYGMNWVRQAPGQGLEWMGWINTYTHEPTYADDFKGRVTMTTDTSTSTAYMELRSLRSDDTAVYYCARIGDSSPSDYWGQGTLVTVSS

SEQ ID NO: 33 - protein, 118 aa, Artificial Sequence
  source: /note="Description of Artificial Sequence: Synthetic polypeptide"
  source: /note="Heavy Chain of Rovalpituzumab IgG histidine scanning variant #21"
QVQLVQSGAEVKKPGASVKVSCKASGYTFTNYGMNWVRQAPGQGLEWMGWINTYTGHPTYADDFKGRVTMTTDTSTSTAYMELRSLRSDDTAVYYCARIGDSSPSDYWGQGTLVTVSS

SEQ ID NO: 34 - protein, 118 aa, Artificial Sequence
  source: /note="Description of Artificial Sequence: Synthetic polypeptide"
  source: /note="Heavy Chain of Rovalpituzumab IgG histidine scanning variant #22"
QVQLVQSGAEVKKPGASVKVSCKASGYTFTNYGMNWVRQAPGQGLEWMGWINTYTGEHTYADDFKGRVTMTTDTSTSTAYMELRSLRSDDTAVYYCARIGDSSPSDYWGQGTLVTVSS

SEQ ID NO: 35 - protein, 118 aa, Artificial Sequence
  source: /note="Description of Artificial Sequence: Synthetic polypeptide"
  source: /note="Heavy Chain of Rovalpituzumab IgG histidine scanning variant #23"
QVQLVQSGAEVKKPGASVKVSCKASGYTFTNYGMNWVRQAPGQGLEWMGWINTYTGEPHYADDFKGRVTMTTDTSTSTAYMELRSLRSDDTAVYYCARIGDSSPSDYWGQGTLVTVSS

SEQ ID NO: 36 - protein, 118 aa, Artificial Sequence
  source: /note="Description of Artificial Sequence: Synthetic polypeptide"
  source: /note="Heavy Chain of Rovalpituzumab IgG histidine scanning variant #24"
QVQLVQSGAEVKKPGASVKVSCKASGYTFTNYGMNWVRQAPGQGLEWMGWINTYTGEPTHADDFKGRVTMTTDTSTSTAYMELRSLRSDDTAVYYCARIGDSSPSDYWGQGTLVTVSS

SEQ ID NO: 37 - protein, 118 aa, Artificial Sequence
  source: /note="Description of Artificial Sequence: Synthetic polypeptide"
  source: /note="Heavy Chain of Rovalpituzumab IgG histidine scanning variant #25"
QVQLVQSGAEVKKPGASVKVSCKASGYTFTNYGMNWVRQAPGQGLEWMGWINTYTGEPTYHDDFKGRVTMTTDTSTSTAYMELRSLRSDDTAVYYCARIGDSSPSDYWGQGTLVTVSS

SEQ ID NO: 38 - protein, 118 aa, Artificial Sequence
  source: /note="Description of Artificial Sequence: Synthetic polypeptide"
  source: /note="Heavy Chain of Rovalpituzumab IgG histidine scanning variant #26"
QVQLVQSGAEVKKPGASVKVSCKASGYTFTNYGMNWVRQAPGQGLEWMGWINTYTGEPTYAHDFKGRVTMTTDTSTSTAYMELRSLRSDDTAVYYCARIGDSSPSDYWGQGTLVTVSS

SEQ ID NO: 39 - protein, 118 aa, Artificial Sequence
  source: /note="Description of Artificial Sequence: Synthetic polypeptide"
  source: /note="Heavy Chain of Rovalpituzumab IgG histidine scanning variant #27"
QVQLVQSGAEVKKPGASVKVSCKASGYTFTNYGMNWVRQAPGQGLEWMGWINTYTGEPTYADHFKGRVTMTTDTSTSTAYMELRSLRSDDTAVYYCARIGDSSPSDYWGQGTLVTVSS

SEQ ID NO: 40 - protein, 118 aa, Artificial Sequence
  source: /note="Description of Artificial Sequence: Synthetic polypeptide"
  source: /note="Heavy Chain of Rovalpituzumab IgG histidine scanning variant #28"
QVQLVQSGAEVKKPGASVKVSCKASGYTFTNYGMNWVRQAPGQGLEWMGWINTYTGEPTYADDHKGRVTMTTDTSTSTAYMELRSLRSDDTAVYYCARIGDSSPSDYWGQGTLVTVSS

SEQ ID NO: 41 - protein, 118 aa, Artificial Sequence
  source: /note="Description of Artificial Sequence: Synthetic polypeptide"
  source: /note="Heavy Chain of Rovalpituzumab IgG histidine scanning variant #29"
QVQLVQSGAEVKKPGASVKVSCKASGYTFTNYGMNWVRQAPGQGLEWMGWINTYTGEPTYADDFHGRVTMTTDTSTSTAYMELRSLRSDDTAVYYCARIGDSSPSDYWGQGTLVTVSS

SEQ ID NO: 42 - protein, 118 aa, Artificial Sequence
  source: /note="Description of Artificial Sequence: Synthetic polypeptide"
  source: /note="Heavy Chain of Rovalpituzumab IgG histidine scanning variant #30"
QVQLVQSGAEVKKPGASVKVSCKASGYTFTNYGMNWVRQAPGQGLEWMGWINTYTGEPTYADDFKHRVTMTTDTSTSTAYMELRSLRSDDTAVYYCARIGDSSPSDYWGQGTLVTVSS

SEQ ID NO: 43 - protein, 118 aa, Artificial Sequence
  source: /note="Description of Artificial Sequence: Synthetic polypeptide"
  source: /note="Heavy Chain of Rovalpituzumab IgG histidine scanning variant #31"
QVQLVQSGAEVKKPGASVKVSCKASGYTFTNYGMNWVRQAPGQGLEWMGWINTYTGEPTYADDFKGRVTMTTDTSTSTAYMELRSLRSDDTAVYYCHRIGDSSPSDYWGQGTLVTVSS

SEQ ID NO: 44 - protein, 118 aa, Artificial Sequence
  source: /note="Description of Artificial Sequence: Synthetic polypeptide"
  source: /note="Heavy Chain of Rovalpituzumab IgG histidine scanning variant #32"
QVQLVQSGAEVKKPGASVKVSCKASGYTFTNYGMNWVRQAPGQGLEWMGWINTYTGEPTYADDFKGRVTMTTDTSTSTAYMELRSLRSDDTAVYYCAHIGDSSPSDYWGQGTLVTVSS

SEQ ID NO: 45 - protein, 118 aa, Artificial Sequence
  source: /note="Description of Artificial Sequence: Synthetic polypeptide"
  source: /note="Heavy Chain of Rovalpituzumab IgG histidine scanning variant #33"
QVQLVQSGAEVKKPGASVKVSCKASGYTFTNYGMNWVRQAPGQGLEWMGWINTYTGEPTYADDFKGRVTMTTDTSTSTAYMELRSLRSDDTAVYYCARHGDSSPSDYWGQGTLVTVSS

SEQ ID NO: 46 - protein, 118 aa, Artificial Sequence
  source: /note="Description of Artificial Sequence: Synthetic polypeptide"
  source: /note="Heavy Chain of Rovalpituzumab IgG histidine scanning variant #34"
QVQLVQSGAEVKKPGASVKVSCKASGYTFTNYGMNWVRQAPGQGLEWMGWINTYTGEPTYADDFKGRVTMTTDTSTSTAYMELRSLRSDDTAVYYCARIHDSSPSDYWGQGTLVTVSS

SEQ ID NO: 47 - protein, 118 aa, Artificial Sequence
  source: /note="Description of Artificial Sequence: Synthetic polypeptide"
  source: /note="Heavy Chain of Rovalpituzumab IgG histidine scanning variant #35"
QVQLVQSGAEVKKPGASVKVSCKASGYTFTNYGMNWVRQAPGQGLEWMGWINTYTGEPTYADDFKGRVTMTTDTSTSTAYMELRSLRSDDTAVYYCARIGHSSPSDYWGQGTLVTVSS

SEQ ID NO: 48 - protein, 118 aa, Artificial Sequence
  source: /note="Description of Artificial Sequence: Synthetic polypeptide"
  source: /note="Heavy Chain of Rovalpituzumab IgG histidine scanning variant #36"
QVQLVQSGAEVKKPGASVKVSCKASGYTFTNYGMNWVRQAPGQGLEWMGWINTYTGEPTYADDFKGRVTMTTDTSTSTAYMELRSLRSDDTAVYYCARIGDHSPSDYWGQGTLVTVSS

SEQ ID NO: 49 - protein, 118 aa, Artificial Sequence
  source: /note="Description of Artificial Sequence: Synthetic polypeptide"
  source: /note="Heavy Chain of Rovalpituzumab IgG histidine scanning variant #37"
QVQLVQSGAEVKKPGASVKVSCKASGYTFTNYGMNWVRQAPGQGLEWMGWINTYTGEPTYADDFKGRVTMTTDTSTSTAYMELRSLRSDDTAVYYCARIGDSHPSDYWGQGTLVTVSS

SEQ ID NO: 50 - protein, 118 aa, Artificial Sequence
  source: /note="Description of Artificial Sequence: Synthetic polypeptide"
  source: /note="Heavy Chain of Rovalpituzumab IgG histidine scanning variant #38"
QVQLVQSGAEVKKPGASVKVSCKASGYTFTNYGMNWVRQAPGQGLEWMGWINTYTGEPTYADDFKGRVTMTTDTSTSTAYMELRSLRSDDTAVYYCARIGDSSHSDYWGQGTLVTVSS

SEQ ID NO: 51 - protein, 118 aa, Artificial Sequence
  source: /note="Description of Artificial Sequence: Synthetic polypeptide"
  source: /note="Heavy Chain of Rovalpituzumab IgG histidine scanning variant #39"
QVQLVQSGAEVKKPGASVKVSCKASGYTFTNYGMNWVRQAPGQGLEWMGWINTYTGEPTYADDFKGRVTMTTDTSTSTAYMELRSLRSDDTAVYYCARIGDSSPHDYWGQGTLVTVSS

SEQ ID NO: 52 - protein, 118 aa, Artificial Sequence
  source: /note="Description of Artificial Sequence: Synthetic polypeptide"
  source: /note="Heavy Chain of Rovalpituzumab IgG histidine scanning variant #40"
QVQLVQSGAEVKKPGASVKVSCKASGYTFTNYGMNWVRQAPGQGLEWMGWINTYTGEPTYADDFKGRVTMTTDTSTSTAYMELRSLRSDDTAVYYCARIGDSSPSHYWGQGTLVTVSS

SEQ ID NO: 53 - protein, 118 aa, Artificial Sequence
  source: /note="Description of Artificial Sequence: Synthetic polypeptide"
  source: /note="Heavy Chain of Rovalpituzumab IgG histidine scanning variant #41"
QVQLVQSGAEVKKPGASVKVSCKASGYTFTNYGMNWVRQAPGQGLEWMGWINTYTGEPTYADDFKGRVTMTTDTSTSTAYMELRSLRSDDTAVYYCARIGDSSPSDHWGQGTLVTVSS

SEQ ID NO: 54 - protein, 107 aa, Artificial Sequence
  source: /note="Description of Artificial Sequence: Synthetic polypeptide"
  source: /note="Light Chain of Rovalpituzumab IgG histidine scanning variant #1"
EIVMTQSPATLSVSPGERATLSCHASQSVSNDVVWYQQKPGQAPRLLIYYASNRYTGIPARFSGSGSGTEFTLTISSLQSEDFAVYYCQQDYTSPWTFGQGTKLEIK

SEQ ID NO: 55 - protein, 107 aa, Artificial Sequence
  source: /note="Description of Artificial Sequence: Synthetic polypeptide"
  source: /note="Light Chain of Rovalpituzumab IgG histidine scanning variant #2"
EIVMTQSPATLSVSPGERATLSCKHSQSVSNDVVWYQQKPGQAPRLLIYYASNRYTGIPARFSGSGSGTEFTLTISSLQSEDFAVYYCQQDYTSPWTFGQGTKLEIK

SEQ ID NO: 56 - protein, 107 aa, Artificial Sequence
  source: /note="Description of Artificial Sequence: Synthetic polypeptide"
  source: /note="Light Chain of Rovalpituzumab IgG histidine scanning variant #3"
EIVMTQSPATLSVSPGERATLSCKAHQSVSNDVVWYQQKPGQAPRLLIYYASNRYTGIPARFSGSGSGTEFTLTISSLQSEDFAVYYCQQDYTSPWTFGQGTKLEIK

SEQ ID NO: 57 - protein, 107 aa, Artificial Sequence
  source: /note="Description of Artificial Sequence: Synthetic polypeptide"
  source: /note="Light Chain of Rovalpituzumab IgG histidine scanning variant #4"
EIVMTQSPATLSVSPGERATLSCKASHSVSNDVVWYQQKPGQAPRLLIYYASNRYTGIPARFSGSGSGTEFTLTISSLQSEDFAVYYCQQDYTSPWTFGQGTKLEIK

SEQ ID NO: 58 - protein, 107 aa, Artificial Sequence
  source: /note="Description of Artificial Sequence: Synthetic polypeptide"
  source: /note="Light Chain of Rovalpituzumab IgG histidine scanning variant #5"
EIVMTQSPATLSVSPGERATLSCKASQHVSNDVVWYQQKPGQAPRLLIYYASNRYTGIPARFSGSGSGTEFTLTISSLQSEDFAVYYCQQDYTSPWTFGQGTKLEIK

SEQ ID NO: 59 - protein, 107 aa, Artificial Sequence
  source: /note="Description of Artificial Sequence: Synthetic polypeptide"
  source: /note="Light Chain of Rovalpituzumab IgG histidine scanning variant #6"
EIVMTQSPATLSVSPGERATLSCKASQSHSNDVVWYQQKPGQAPRLLIYYASNRYTGIPARFSGSGSGTEFTLTISSLQSEDFAVYYCQQDYTSPWTFGQGTKLEIK

SEQ ID NO: 60 - protein, 107 aa, Artificial Sequence
  source: /note="Description of Artificial Sequence: Synthetic polypeptide"
  source: /note="Light Chain of Rovalpituzumab IgG histidine scanning variant #7"
EIVMTQSPATLSVSPGERATLSCKASQSVHNDVVWYQQKPGQAPRLLIYYASNRYTGIPARFSGSGSGTEFTLTISSLQSEDFAVYYCQQDYTSPWTFGQGTKLEIK

SEQ ID NO: 61 - protein, 107 aa, Artificial Sequence
  source: /note="Description of Artificial Sequence: Synthetic polypeptide"
  source: /note="Light Chain of Rovalpituzumab IgG histidine scanning variant #8"
EIVMTQSPATLSVSPGERATLSCKASQSVSHDVVWYQQKPGQAPRLLIYYASNRYTGIPARFSGSGSGTEFTLTISSLQSEDFAVYYCQQDYTSPWTFGQGTKLEIK

SEQ ID NO: 62 - protein, 107 aa, Artificial Sequence
  source: /note="Description of Artificial Sequence: Synthetic polypeptide"
  source: /note="Light Chain of Rovalpituzumab IgG histidine scanning variant #9"
EIVMTQSPATLSVSPGERATLSCKASQSVSNHVVWYQQKPGQAPRLLIYYASNRYTGIPARFSGSGSGTEFTLTISSLQSEDFAVYYCQQDYTSPWTFGQGTKLEIK

SEQ ID NO: 63 - protein, 107 aa, Artificial Sequence
  source: /note="Description of Artificial Sequence: Synthetic polypeptide"
  source: /note="Light Chain of Rovalpituzumab IgG histidine scanning variant #10"
EIVMTQSPATLSVSPGERATLSCKASQSVSNDHVWYQQKPGQAPRLLIYYASNRYTGIPARFSGSGSGTEFTLTISSLQSEDFAVYYCQQDYTSPWTFGQGTKLEIK

SEQ ID NO: 64 - protein, 107 aa, Artificial Sequence
  source: /note="Description of Artificial Sequence: Synthetic polypeptide"
  source: /note="Light Chain of Rovalpituzumab IgG histidine scanning variant #11"
EIVMTQSPATLSVSPGERATLSCKASQSVSNDVHWYQQKPGQAPRLLIYYASNRYTGIPARFSGSGSGTEFTLTISSLQSEDFAVYYCQQDYTSPWTFGQGTKLEIK

SEQ ID NO: 65 - protein, 107 aa, Artificial Sequence
  source: /note="Description of Artificial Sequence: Synthetic polypeptide"
  source: /note="Light Chain of Rovalpituzumab IgG histidine scanning variant #12"
EIVMTQSPATLSVSPGERATLSCKASQSVSNDVVWYQQKPGQAPRLLIYHASNRYTGIPARFSGSGSGTEFTLTISSLQSEDFAVYYCQQDYTSPWTFGQGTKLEIK

SEQ ID NO: 66 - protein, 107 aa, Artificial Sequence
  source: /note="Description of Artificial Sequence: Synthetic polypeptide"
  source: /note="Light Chain of Rovalpituzumab IgG histidine scanning variant #13"
EIVMTQSPATLSVSPGERATLSCKASQSVSNDVVWYQQKPGQAPRLLIYYHSNRYTGIPARFSGSGSGTEFTLTISSLQSEDFAVYYCQQDYTSPWTFGQGTKLEIK

SEQ ID NO: 67 - protein, 107 aa, Artificial Sequence
  source: /note="Description of Artificial Sequence: Synthetic polypeptide"
  source: /note="Light Chain of Rovalpituzumab IgG histidine scanning variant #14"
EIVMTQSPATLSVSPGERATLSCKASQSVSNDVVWYQQKPGQAPRLLIYYAHNRYTGIPARFSGSGSGTEFTLTISSLQSEDFAVYYCQQDYTSPWTFGQGTKLEIK

SEQ ID NO: 68 - protein, 107 aa, Artificial Sequence
  source: /note="Description of Artificial Sequence: Synthetic polypeptide"
  source: /note="Light Chain of Rovalpituzumab IgG histidine scanning variant #15"
EIVMTQSPATLSVSPGERATLSCKASQSVSNDVVWYQQKPGQAPRLLIYYASHRYTGIPARFSGSGSGTEFTLTISSLQSEDFAVYYCQQDYTSPWTFGQGTKLEIK

SEQ ID NO: 69 - protein, 107 aa, Artificial Sequence
  source: /note="Description of Artificial Sequence: Synthetic polypeptide"
  source: /note="Light Chain of Rovalpituzumab IgG histidine scanning variant #16"
EIVMTQSPATLSVSPGERATLSCKASQSVSNDVVWYQQKPGQAPRLLIYYASNHYTGIPARFSGSGSGTEFTLTISSLQSEDFAVYYCQQDYTSPWTFGQGTKLEIK

SEQ ID NO: 70 - protein, 107 aa, Artificial Sequence
  source: /note="Description of Artificial Sequence: Synthetic polypeptide"
  source: /note="Light Chain of Rovalpituzumab IgG histidine scanning variant #17"
EIVMTQSPATLSVSPGERATLSCKASQSVSNDVVWYQQKPGQAPRLLIYYASNRHTGIPARFSGSGSGTEFTLTISSLQSEDFAVYYCQQDYTSPWTFGQGTKLEIK

SEQ ID NO: 71 - protein, 107 aa, Artificial Sequence
  source: /note="Description of Artificial Sequence: Synthetic polypeptide"
  source: /note="Light Chain of Rovalpituzumab IgG histidine scanning variant #18"
EIVMTQSPATLSVSPGERATLSCKASQSVSNDVVWYQQKPGQAPRLLIYYASNRYHGIPARFSGSGSGTEFTLTISSLQSEDFAVYYCQQDYTSPWTFGQGTKLEIK

SEQ ID NO: 72 - protein, 107 aa, Artificial Sequence
  source: /note="Description of Artificial Sequence: Synthetic polypeptide"
  source: /note="Light Chain of Rovalpituzumab IgG histidine scanning variant #19"
EIVMTQSPATLSVSPGERATLSCKASQSVSNDVVWYQQKPGQAPRLLIYYASNRYTGIPARFSGSGSGTEFTLTISSLQSEDFAVYYCHQDYTSPWTFGQGTKLEIK

SEQ ID NO: 73 - protein, 107 aa, Artificial Sequence
  source: /note="Description of Artificial Sequence: Synthetic polypeptide"
  source: /note="Light Chain of Rovalpituzumab IgG histidine scanning variant #20"
EIVMTQSPATLSVSPGERATLSCKASQSVSNDVVWYQQKPGQAPRLLIYYASNRYTGIPARFSGSGSGTEFTLTISSLQSEDFAVYYCQHDYTSPWTFGQGTKLEIK

SEQ ID NO: 74 - protein, 107 aa, Artificial Sequence
  source: /note="Description of Artificial Sequence: Synthetic polypeptide"
  source: /note="Light Chain of Rovalpituzumab IgG histidine scanning variant #21"
EIVMTQSPATLSVSPGERATLSCKASQSVSNDVVWYQQKPGQAPRLLIYYASNRYTGIPARFSGSGSGTEFTLTISSLQSEDFAVYYCQQHYTSPWTFGQGTKLEIK

SEQ ID NO: 75 - protein, 107 aa, Artificial Sequence
  source: /note="Description of Artificial Sequence: Synthetic polypeptide"
  source: /note="Light Chain of Rovalpituzumab IgG histidine scanning variant #22"
EIVMTQSPATLSVSPGERATLSCKASQSVSNDVVWYQQKPGQAPRLLIYYASNRYTGIPARFSGSGSGTEFTLTISSLQSEDFAVYYCQQDHTSPWTFGQGTKLEIK

SEQ ID NO: 76 - protein, 107 aa, Artificial Sequence
  source: /note="Description of Artificial Sequence: Synthetic polypeptide"
  source: /note="Light Chain of Rovalpituzumab IgG histidine scanning variant #23"
EIVMTQSPATLSVSPGERATLSCKASQSVSNDVVWYQQKPGQAPRLLIYYASNRYTGIPARFSGSGSGTEFTLTISSLQSEDFAVYYCQQDYHSPWTFGQGTKLEIK

SEQ ID NO: 77 - protein, 107 aa, Artificial Sequence
  source: /note="Description of Artificial Sequence: Synthetic polypeptide"
  source: /note="Light Chain of Rovalpituzumab IgG histidine scanning variant #24"
EIVMTQSPATLSVSPGERATLSCKASQSVSNDVVWYQQKPGQAPRLLIYYASNRYTGIPARFSGSGSGTEFTLTISSLQSEDFAVYYCQQDYTHPWTFGQGTKLEIK

SEQ ID NO: 78 - protein, 107 aa, Artificial Sequence
  source: /note="Description of Artificial Sequence: Synthetic polypeptide"
  source: /note="Light Chain of Rovalpituzumab IgG histidine scanning variant #25"
EIVMTQSPATLSVSPGERATLSCKASQSVSNDVVWYQQKPGQAPRLLIYYASNRYTGIPARFSGSGSGTEFTLTISSLQSEDFAVYYCQQDYTSHWTFGQGTKLEIK

SEQ ID NO: 79 - protein, 107 aa, Artificial Sequence
  source: /note="Description of Artificial Sequence: Synthetic polypeptide"
  source: /note="Light Chain of Rovalpituzumab IgG histidine scanning variant #26"
EIVMTQSPATLSVSPGERATLSCKASQSVSNDVVWYQQKPGQAPRLLIYYASNRYTGIPARFSGSGSGTEFTLTISSLQSEDFAVYYCQQDYTSPHTFGQGTKLEIK

SEQ ID NO: 80 - protein, 107 aa, Artificial Sequence
  source: /note="Description of Artificial Sequence: Synthetic polypeptide"
  source: /note="Light Chain of Rovalpituzumab IgG histidine scanning variant #27"
EIVMTQSPATLSVSPGERATLSCKASQSVSNDVVWYQQKPGQAPRLLIYYASNRYTGIPARFSGSGSGTEFTLTISSLQSEDFAVYYCQQDYTSPWHFGQGTKLEIK

SEQ ID NO: 81 - protein, 118 aa, Artificial Sequence
  source: /note="Description of Artificial Sequence: Synthetic polypeptide"
  source: /note="Heavy Chain Combinations of Rovalpituzumab IgG histidine scanning variant #1"
QVQLVQSGAEVKKPGASVKVSCKASGYTHTNYGMNWVRQAPGQGLEWMGWINTHTGEPTYADDFKGRVTMTTDTSTSTAYMELRSLRSDDTAVYYCARIGDSSPSDYWGQGTLVTVSS

SEQ ID NO: 82 - protein, 118 aa, Artificial Sequence
  source: /note="Description of Artificial Sequence: Synthetic polypeptide"
  source: /note="Heavy Chain Combinations of Rovalpituzumab IgG histidine scanning variant #2"
QVQLVQSGAEVKKPGASVKVSCKASGYTFTHYGMNWVRQAPGQGLEWMGWINTHTGEPTYADDFKGRVTMTTDTSTSTAYMELRSLRSDDTAVYYCARIGDSSPSDYWGQGTLVTVSS

SEQ ID NO: 83 - protein, 118 aa, Artificial Sequence
  source: /note="Description of Artificial Sequence: Synthetic polypeptide"
  source: /note="Heavy Chain Combinations of Rovalpituzumab IgG histidine scanning variant #3"
QVQLVQSGAEVKKPGASVKVSCKASGYTFTHYGMNWVRQAPGQGLEWMGWINTYHGEPTYADDFKGRVTMTTDTSTSTAYMELRSLRSDDTAVYYCARIGDSSPSDYWGQGTLVTVSS

SEQ ID NO: 84 - protein, 118 aa, Artificial Sequence
  source: /note="Description of Artificial Sequence: Synthetic polypeptide"
  source: /note="Heavy Chain Combinations of Rovalpituzumab IgG histidine scanning variant #4"
QVQLVQSGAEVKKPGASVKVSCKASGYTFTHYGMNWVRQAPGQGLEWMGWINTYTGEPTYADDFKGRVTMTTDTSTSTAYMELRSLRSDDTAVYYCARIGDSSPHDYWGQGTLVTVSS

SEQ ID NO: 85 - protein, 118 aa, Artificial Sequence
  source: /note="Description of Artificial Sequence: Synthetic polypeptide"
  source: /note="Heavy Chain Combinations of Rovalpituzumab IgG histidine scanning variant #5"
QVQLVQSGAEVKKPGASVKVSCKASGYTFTNYGMNWVRQAPGQGLEWMGWINTHHGEPTYADDFKGRVTMTTDTSTSTAYMELRSLRSDDTAVYYCARIGDSSPSDYWGQGTLVTVSS

SEQ ID NO: 86 - protein, 118 aa, Artificial Sequence
  source: /note="Description of Artificial Sequence: Synthetic polypeptide"
  source: /note="Heavy Chain Combinations of Rovalpituzumab IgG histidine scanning variant #6"
QVQLVQSGAEVKKPGASVKVSCKASGYTFTNYGMNWVRQAPGQGLEWMGWINTHTGEPTYADDFKGRVTMTTDTSTSTAYMELRSLRSDDTAVYYCARIGDSSPHDYWGQGTLVTVSS

SEQ ID NO: 87 - protein, 118 aa, Artificial Sequence
  source: /note="Description of Artificial Sequence: Synthetic polypeptide"
  source: /note="Heavy Chain Combinations of Rovalpituzumab IgG histidine scanning variant #7"
QVQLVQSGAEVKKPGASVKVSCKASGYTHTHYGMNWVRQAPGQGLEWMGWINTHTGEPTYADDFKGRVTMTTDTSTSTAYMELRSLRSDDTAVYYCARIGDSSPSDYWGQGTLVTVSS

SEQ ID NO: 88 - protein, 118 aa, Artificial Sequence
  source: /note="Description of Artificial Sequence: Synthetic polypeptide"
  source: /note="Heavy Chain Combinations of Rovalpituzumab IgG histidine scanning variant #8"
QVQLVQSGAEVKKPGASVKVSCKASGYTFTHYGMNWVRQAPGQGLEWMGWINTHHGEPTYADDFKGRVTMTTDTSTSTAYMELRSLRSDDTAVYYCARIGDSSPSDYWGQGTLVTVSS

SEQ ID NO: 89 - protein, 118 aa, Artificial Sequence
  source: /note="Description of Artificial Sequence: Synthetic polypeptide"
  source: /note="Heavy Chain Combinations of Rovalpituzumab IgG histidine scanning variant #9"
QVQLVQSGAEVKKPGASVKVSCKASGYTFTHYGMNWVRQAPGQGLEWMGWINTHTGEPTYADDFKGRVTMTTDTSTSTAYMELRSLRSDDTAVYYCARIGDSSPHDYWGQGTLVTVSS

SEQ ID NO: 90 - protein, 118 aa, Artificial Sequence
  source: /note="Description of Artificial Sequence: Synthetic polypeptide"
  source: /note="Heavy Chain Combinations of Rovalpituzumab IgG histidine scanning variant #10"
QVQLVQSGAEVKKPGASVKVSCKASGYTFTHYGMNWVRQAPGQGLEWMGWINTYHGEPTYADDFKGRVTMTTDTSTSTAYMELRSLRSDDTAVYYCARIGDSSPHDYWGQGTLVTVSS

SEQ ID NO: 91 - protein, 118 aa, Artificial Sequence
  source: /note="Description of Artificial Sequence: Synthetic polypeptide"
  source: /note="Heavy Chain Combinations of Rovalpituzumab IgG histidine scanning variant #11"
QVQLVQSGAEVKKPGASVKVSCKASGYTFTNYGMNWVRQAPGQGLEWMGWINTHHGEPTYADDFKGRVTMTTDTSTSTAYMELRSLRSDDTAVYYCARIGDSSPHDYWGQGTLVTVSS

SEQ ID NO: 92 - protein, 118 aa, Artificial Sequence
  source: /note="Description of Artificial Sequence: Synthetic polypeptide"
  source: /note="Heavy Chain Combinations of Rovalpituzumab IgG histidine scanning variant #12"
QVQLVQSGAEVKKPGASVKVSCKASGYTHTHYGMNWVRQAPGQGLEWMGWINTYTGEPTYADDFKGRVTMTTDTSTSTAYMELRSLRSDDTAVYYCARIGDSSPSDYWGQGTLVTVSS

SEQ ID NO: 93 - protein, 118 aa, Artificial Sequence
  source: /note="Description of Artificial Sequence: Synthetic polypeptide"
  source: /note="Heavy Chain Combinations of Rovalpituzumab IgG histidine scanning variant #13"
QVQLVQSGAEVKKPGASVKVSCKASGYTHTNYGMNWVRQAPGQGLEWMGWINTYTGEPTYADDFKGRVTMTTDTSTSTAYMELRSLRSDDTAVYYCARIGDSSPHDYWGQGTLVTVSS

SEQ ID NO: 94 - protein, 118 aa, Artificial Sequence
  source: /note="Description of Artificial Sequence: Synthetic polypeptide"
  source: /note="Heavy Chain Combinations of Rovalpituzumab IgG histidine scanning variant #14"
QVQLVQSGAEVKKPGASVKVSCKASGYTFTNYGMNWVRQAPGQGLEWMGWINTYHGEPTYADDFKGRVTMTTDTSTSTAYMELRSLRSDDTAVYYCARIGDSSPHDYWGQGTLVTVSS

SEQ ID NO: 95 - protein, 118 aa, Artificial Sequence
  source: /note="Description of Artificial Sequence: Synthetic polypeptide"
  source: /note="Heavy Chain Combinations of Rovalpituzumab IgG histidine scanning variant #15"
QVQLVQSGAEVKKPGASVKVSCKASGYTHTHYGMNWVRQAPGQGLEWMGWINTYHGEPTYADDFKGRVTMTTDTSTSTAYMELRSLRSDDTAVYYCARIGDSSPSDYWGQGTLVTVSS

SEQ ID NO: 96 - protein, 118 aa, Artificial Sequence
  source: /note="Description of Artificial Sequence: Synthetic polypeptide"
  source: /note="Heavy Chain Combinations of Rovalpituzumab IgG histidine scanning variant #16"
QVQLVQSGAEVKKPGASVKVSCKASGYTHTHYGMNWVRQAPGQGLEWMGWINTYTGEPTYADDFKGRVTMTTDTSTSTAYMELRSLRSDDTAVYYCARIGDSSPHDYWGQGTLVTVSS

SEQ ID NO: 97 - protein, 118 aa, Artificial Sequence
  source: /note="Description of Artificial Sequence: Synthetic polypeptide"
  source: /note="Heavy Chain Combinations of Rovalpituzumab IgG histidine scanning variant #17"
QVQLVQSGAEVKKPGASVKVSCKASGYTHTNYGMNWVRQAPGQGLEWMGWINTHHGEPTYADDFKGRVTMTTDTSTSTAYMELRSLRSDDTAVYYCARIGDSSPSDYWGQGTLVTVSS

SEQ ID NO: 98 - protein, 118 aa, Artificial Sequence
  source: /note="Description of Artificial Sequence: Synthetic polypeptide"
  source: /note="Heavy Chain Combinations of Rovalpituzumab IgG histidine scanning variant #18"
QVQLVQSGAEVKKPGASVKVSCKASGYTHTNYGMNWVRQAPGQGLEWMGWINTHTGEPTYADDFKGRVTMTTDTSTSTAYMELRSLRSDDTAVYYCARIGDSSPHDYWGQGTLVTVSS

SEQ ID NO: 99 - protein, 107 aa, Artificial Sequence
  source: /note="Description of Artificial Sequence: Synthetic polypeptide"
  source: /note="Light Chain Combinations of Rovalpituzumab IgG histidine scanning variant #1"
EIVMTQSPATLSVSPGERATLSCKAHQSVSNDVVWYQQKPGQAPRLLIYHASNRYTGIPARFSGSGSGTEFTLTISSLQSEDFAVYYCQQDYTSPWTFGQGTKLEIK

SEQ ID NO: 100 - protein, 107 aa, Artificial Sequence
  source: /note="Description of Artificial Sequence: Synthetic polypeptide"
  source: /note="Light Chain Combinations of Rovalpituzumab IgG histidine scanning variant #2"
EIVMTQSPATLSVSPGERATLSCKAHQSVSNDVVWYQQKPGQAPRLLIYYASNRYTGIPARFSGSGSGTEFTLTISSLQSEDFAVYYCQQDYHSPWTFGQGTKLEIK

SEQ ID NO: 101 - protein, 107 aa, Artificial Sequence
  source: /note="Description of Artificial Sequence: Synthetic polypeptide"
  source: /note="Light Chain Combinations of Rovalpituzumab IgG histidine scanning variant #3"
EIVMTQSPATLSVSPGERATLSCKAHQSVSNDVVWYQQKPGQAPRLLIYYASNRYTGIPARFSGSGSGTEFTLTISSLQSEDFAVYYCQQDYTHPWTFGQGTKLEIK

SEQ ID NO: 102 - protein, 107 aa, Artificial Sequence
  source: /note="Description of Artificial Sequence: Synthetic polypeptide"
  source: /note="Light Chain Combinations of Rovalpituzumab IgG histidine scanning variant #4"
EIVMTQSPATLSVSPGERATLSCKAHQSVSNDVVWYQQKPGQAPRLLIYYASNRYTGIPARFSGSGSGTEFTLTISSLQSEDFAVYYCQQDYTSPWHFGQGTKLEIK

SEQ ID NO: 103 - protein, 107 aa, Artificial Sequence
  source: /note="Description of Artificial Sequence: Synthetic polypeptide"
  source: /note="Light Chain Combinations of Rovalpituzumab IgG histidine scanning variant #5"
EIVMTQSPATLSVSPGERATLSCKASQSVSNDVVWYQQKPGQAPRLLIYHASNRYTGIPARFSGSGSGTEFTLTISSLQSEDFAVYYCQQDYHSPWTFGQGTKLEIK

SEQ ID NO: 104 - protein, 107 aa, Artificial Sequence
  source: /note="Description of Artificial Sequence: Synthetic polypeptide"
  source: /note="Light Chain Combinations of Rovalpituzumab IgG histidine scanning variant #6"
EIVMTQSPATLSVSPGERATLSCKASQSVSNDVVWYQQKPGQAPRLLIYHASNRYTGIPARFSGSGSGTEFTLTISSLQSEDFAVYYCQQDYTHPWTFGQGTKLEIK

SEQ ID NO: 105 - protein, 107 aa, Artificial Sequence
  source: /note="Description of Artificial Sequence: Synthetic polypeptide"
  source: /note="Light Chain Combinations of Rovalpituzumab IgG histidine scanning variant #7"
EIVMTQSPATLSVSPGERATLSCKASQSVSNDVVWYQQKPGQAPRLLIYHASNRYTGIPARFSGSGSGTEFTLTISSLQSEDFAVYYCQQDYTSPWHFGQGTKLEIK

SEQ ID NO: 106 - protein, 107 aa, Artificial Sequence
  source: /note="Description of Artificial Sequence: Synthetic polypeptide"
  source: /note="Light Chain Combinations of Rovalpituzumab IgG histidine scanning variant #8"
EIVMTQSPATLSVSPGERATLSCKASQSVSNDVVWYQQKPGQAPRLLIYYASNRYTGIPARFSGSGSGTEFTLTISSLQSEDFAVYYCQQDYHHPWTFGQGTKLEIK

SEQ ID NO: 107 - protein, 107 aa, Artificial Sequence
  source: /note="Description of Artificial Sequence: Synthetic polypeptide"
  source: /note="Light Chain Combinations of Rovalpituzumab IgG histidine scanning variant #9"
EIVMTQSPATLSVSPGERATLSCKASQSVSNDVVWYQQKPGQAPRLLIYYASNRYTGIPARFSGSGSGTEFTLTISSLQSEDFAVYYCQQDYHSPWHFGQGTKLEIK

SEQ ID NO: 108 - protein, 107 aa, Artificial Sequence
  source: /note="Description of Artificial Sequence: Synthetic polypeptide"
  source: /note="Light Chain Combinations of Rovalpituzumab IgG histidine scanning variant #10"
EIVMTQSPATLSVSPGERATLSCKASQSVSNDVVWYQQKPGQAPRLLIYYASNRYTGIPARFSGSGSGTEFTLTISSLQSEDFAVYYCQQDYTHPWHFGQGTKLEIK

SEQ ID NO: 109 - protein, 107 aa, Artificial Sequence
  source: /note="Description of Artificial Sequence: Synthetic polypeptide"
  source: /note="Light Chain Combinations of Rovalpituzumab IgG histidine scanning variant #11"
EIVMTQSPATLSVSPGERATLSCKAHQSVSNDVVWYQQKPGQAPRLLIYHASNRYTGIPARFSGSGSGTEFTLTISSLQSEDFAVYYCQQDYHSPWTFGQGTKLEIK

SEQ ID NO: 110 - protein, 107 aa, Artificial Sequence
  source: /note="Description of Artificial Sequence: Synthetic polypeptide"
  source: /note="Light Chain Combinations of Rovalpituzumab IgG histidine scanning variant #12"
EIVMTQSPATLSVSPGERATLSCKAHQSVSNDVVWYQQKPGQAPRLLIYHASNRYTGIPARFSGSGSGTEFTLTISSLQSEDFAVYYCQQDYTHPWTFGQGTKLEIK

SEQ ID NO: 111 - protein, 107 aa, Artificial Sequence
  source: /note="Description of Artificial Sequence: Synthetic polypeptide"
  source: /note="Light Chain Combinations of Rovalpituzumab IgG histidine scanning variant #13"
EIVMTQSPATLSVSPGERATLSCKAHQSVSNDVVWYQQKPGQAPRLLIYHASNRYTGIPARFSGSGSGTEFTLTISSLQSEDFAVYYCQQDYTSPWHFGQGTKLEIK

SEQ ID NO: 112 - protein, 107 aa, Artificial Sequence
  source: /note="Description of Artificial Sequence: Synthetic polypeptide"
  source: /note="Light Chain Combinations of Rovalpituzumab IgG histidine scanning variant #14"
EIVMTQSPATLSVSPGERATLSCKAHQSVSNDVVWYQQKPGQAPRLLIYYASNRYTGIPARFSGSGSGTEFTLTISSLQSEDFAVYYCQQDYHHPWTFGQGTKLEIK

SEQ ID NO: 113 - protein, 107 aa, Artificial Sequence
  source: /note="Description of Artificial Sequence: Synthetic polypeptide"
  source: /note="Light Chain Combinations of Rovalpituzumab IgG histidine scanning variant #15"
EIVMTQSPATLSVSPGERATLSCKAHQSVSNDVVWYQQKPGQAPRLLIYYASNRYTGIPARFSGSGSGTEFTLTISSLQSEDFAVYYCQQDYHSPWHFGQGTKLEIK

SEQ ID NO: 114 - protein, 107 aa, Artificial Sequence
  source: /note="Description of Artificial Sequence: Synthetic polypeptide"
  source: /note="Light Chain Combinations of Rovalpituzumab IgG histidine scanning variant #16"
EIVMTQSPATLSVSPGERATLSCKAHQSVSNDVVWYQQKPGQAPRLLIYYASNRYTGIPARFSGSGSGTEFTLTISSLQSEDFAVYYCQQDYTHPWHFGQGTKLEIK

SEQ ID NO: 115 - protein, 107 aa, Artificial Sequence
  source: /note="Description of Artificial Sequence: Synthetic polypeptide"
  source: /note="Light Chain Combinations of Rovalpituzumab IgG histidine scanning variant #17"
EIVMTQSPATLSVSPGERATLSCKASQSVSNDVVWYQQKPGQAPRLLIYHASNRYTGIPARFSGSGSGTEFTLTISSLQSEDFAVYYCQQDYHHPWTFGQGTKLEIK

SEQ ID NO: 116 - protein, 107 aa, Artificial Sequence
  source: /note="Description of Artificial Sequence: Synthetic polypeptide"
  source: /note="Light Chain Combinations of Rovalpituzumab IgG histidine scanning variant #18"
EIVMTQSPATLSVSPGERATLSCKASQSVSNDVVWYQQKPGQAPRLLIYHASNRYTGIPARFSGSGSGTEFTLTISSLQSEDFAVYYCQQDYHSPWHFGQGTKLEIK

SEQ ID NO: 117 - protein, 107 aa, Artificial Sequence
  source: /note="Description of Artificial Sequence: Synthetic polypeptide"
  source: /note="Light Chain Combinations of Rovalpituzumab IgG histidine scanning variant #19"
EIVMTQSPATLSVSPGERATLSCKASQSVSNDVVWYQQKPGQAPRLLIYHASNRYTGIPARFSGSGSGTEFTLTISSLQSEDFAVYYCQQDYTHPWHFGQGTKLEIK

SEQ ID NO: 118 - protein, 107 aa, Artificial Sequence
  source: /note="Description of Artificial Sequence: Synthetic polypeptide"
  source: /note="Light Chain Combinations of Rovalpituzumab IgG histidine scanning variant #20"
EIVMTQSPATLSVSPGERATLSCKASQSVSNDVVWYQQKPGQAPRLLIYYASNRYTGIPARFSGSGSGTEFTLTISSLQSEDFAVYYCQQDYHHPWHFGQGTKLEIK

SEQ ID NO: 119 - protein, 117 aa, Artificial Sequence
  source: /note="Description of Artificial Sequence: Synthetic polypeptide"
  source: /note="Heavy Chain of SC16.4 IgG"
QIQLVQSGPELKKPGETVKISCKASGYTFTDYSMHWVKQAPGKGLKWMGWINTETGEPGYADDFKGRFAFSLETSASTAYLQINNLKNEDTATYFCARYDGYAMDYWGQGTSVTVSS

SEQ ID NO: 120 - protein, 107 aa, Artificial Sequence
  source: /note="Description of Artificial Sequence: Synthetic polypeptide"
  source: /note="Light Chain of SC16.4 IgG"
DIQMTQTTSSLSASLGDRVTISCRASQDISNYLNWYQQKPDGTVKLLIYYTSRLHSGVPSRFSGSGSGTDYSLTISNLELEDIATYFCQQGDMLPWTFGGGTKLEIK

SEQ ID NO: 121 - protein, 117 aa, Artificial Sequence
  source: /note="Description of Artificial Sequence: Synthetic polypeptide"
  source: /note="Heavy Chain of SC16.4 IgG histidine scanning variant #1"
QIQLVQSGPELKKPGETVKISCKASHYTFTDYSMHWVKQAPGKGLKWMGWINTETGEPGYADDFKGRFAFSLETSASTAYLQINNLKNEDTATYFCARYDGYAMDYWGQGTSVTVSS

SEQ ID NO: 122 - protein, 117 aa, Artificial Sequence
  source: /note="Description of Artificial Sequence: Synthetic polypeptide"
  source: /note="Heavy Chain of SC16.4 IgG histidine scanning variant #2"
QIQLVQSGPELKKPGETVKISCKASGHTFTDYSMHWVKQAPGKGLKWMGWINTETGEPGYADDFKGRFAFSLETSASTAYLQINNLKNEDTATYFCARYDGYAMDYWGQGTSVTVSS

SEQ ID NO: 123 - protein, 117 aa, Artificial Sequence
  source: /note="Description of Artificial Sequence: Synthetic polypeptide"
  source: /note="Heavy Chain of SC16.4 IgG histidine scanning variant #3"
QIQLVQSGPELKKPGETVKISCKASGYHFTDYSMHWVKQAPGKGLKWMGWINTETGEPGYADDFKGRFAFSLETSASTAYLQINNLKNEDTATYFCARYDGYAMDYWGQGTSVTVSS

SEQ ID NO: 124 - protein, 117 aa, Artificial Sequence
  source: /note="Description of Artificial Sequence: Synthetic polypeptide"
  source: /note="Heavy Chain of SC16.4 IgG histidine scanning variant #4"
QIQLVQSGPELKKPGETVKISCKASGYTHTDYSMHWVKQAPGKGLKWMGWINTETGEPGYADDFKGRFAFSLETSASTAYLQINNLKNEDTATYFCARYDGYAMDYWGQGTSVTVSS

SEQ ID NO: 125 - protein, 117 aa, Artificial Sequence
  source: /note="Description of Artificial Sequence: Synthetic polypeptide"
  source: /note="Heavy Chain of SC16.4 IgG histidine scanning variant #5"
QIQLVQSGPELKKPGETVKISCKASGYTFHDYSMHWVKQAPGKGLKWMGWINTETGEPGYADDFKGRFAFSLETSASTAYLQINNLKNEDTATYFCARYDGYAMDYWGQGTSVTVSS

SEQ ID NO: 126 - protein, 117 aa, Artificial Sequence
  source: /note="Description of Artificial Sequence: Synthetic polypeptide"
  source: /note="Heavy Chain of SC16.4 IgG histidine scanning variant #6"
QIQLVQSGPELKKPGETVKISCKASGYTFTHYSMHWVKQAPGKGLKWMGWINTETGEPGYADDFKGRFAFSLETSASTAYLQINNLKNEDTATYFCARYDGYAMDYWGQGTSVTVSS

SEQ ID NO: 127 - protein, 117 aa, Artificial Sequence
  source: /note="Description of Artificial Sequence: Synthetic polypeptide"
  source: /note="Heavy Chain of SC16.4 IgG histidine scanning variant #7"
QIQLVQSGPELKKPGETVKISCKASGYTFTDHSMHWVKQAPGKGLKWMGWINTETGEPGYADDFKGRFAFSLETSASTAYLQINNLKNEDTATYFCARYDGYAMDYWGQGTSVTVSS

SEQ ID NO: 128 - protein, 117 aa, Artificial Sequence
  source: /note="Description of Artificial Sequence: Synthetic polypeptide"
  source: /note="Heavy Chain of SC16.4 IgG histidine scanning variant #8"
QIQLVQSGPELKKPGETVKISCKASGYTFTDYHMHWVKQAPGKGLKWMGWINTETGEPGYADDFKGRFAFSLETSASTAYLQINNLKNEDTATYFCARYDGYAMDYWGQGTSVTVSS

SEQ ID NO: 129 - protein, 117 aa, Artificial Sequence
  source: /note="Description of Artificial Sequence: Synthetic polypeptide"
  source: /note="Heavy Chain of SC16.4 IgG histidine scanning variant #9"
QIQLVQSGPELKKPGETVKISCKASGYTFTDYSHHWVKQAPGKGLKWMGWINTETGEPGYADDFKGRFAFSLETSASTAYLQINNLKNEDTATYFCARYDGYAMDYWGQGTSVTVSS

SEQ ID NO: 130 - protein, 117 aa, Artificial Sequence
  source: /note="Description of Artificial Sequence: Synthetic polypeptide"
  source: /note="Heavy Chain of SC16.4 IgG histidine scanning variant #10"
QIQLVQSGPELKKPGETVKISCKASGYTFTDYSMAWVKQAPGKGLKWMGWINTETGEPGYADDFKGRFAFSLETSASTAYLQINNLKNEDTATYFCARYDGYAMDYWGQGTSVTVSS

SEQ ID NO: 131 - protein, 117 aa, Artificial Sequence
  source: /note="Description of Artificial Sequence: Synthetic polypeptide"
  source: /note="Heavy Chain of SC16.4 IgG histidine scanning variant #11"
QIQLVQSGPELKKPGETVKISCKASGYTFTDYSMHWVKQAPGKGLKWMGHINTETGEPGYADDFKGRFAFSLETSASTAYLQINNLKNEDTATYFCARYDGYAMDYWGQGTSVTVSS

SEQ ID NO: 132 - protein, 117 aa, Artificial Sequence
  source: /note="Description of Artificial Sequence: Synthetic polypeptide"
  source: /note="Heavy Chain of SC16.4 IgG histidine scanning variant #12"
QIQLVQSGPELKKPGETVKISCKASGYTFTDYSMHWVKQAPGKGLKWMGWHNTETGEPGYADDFKGRFAFSLETSASTAYLQINNLKNEDTATYFCARYDGYAMDYWGQGTSVTVSS

SEQ ID NO: 133 - protein, 117 aa, Artificial Sequence
  source: /note="Description of Artificial Sequence: Synthetic polypeptide"
  source: /note="Heavy Chain of SC16.4 IgG histidine scanning variant #13"
QIQLVQSGPELKKPGETVKISCKASGYTFTDYSMHWVKQAPGKGLKWMGWIHTETGEPGYADDFKGRFAFSLETSASTAYLQINNLKNEDTATYFCARYDGYAMDYWGQGTSVTVSS

SEQ ID NO: 134 - protein, 117 aa, Artificial Sequence
  source: /note="Description of Artificial Sequence: Synthetic polypeptide"
  source: /note="Heavy Chain of SC16.4 IgG histidine scanning variant #14"
QIQLVQSGPELKKPGETVKISCKASGYTFTDYSMHWVKQAPGKGLKWMGWINHETGEPGYADDFKGRFAFSLETSASTAYLQINNLKNEDTATYFCARYDGYAMDYWGQGTSVTVSS

SEQ ID NO: 135 - protein, 117 aa, Artificial Sequence
  source: /note="Description of Artificial Sequence: Synthetic polypeptide"
  source: /note="Heavy Chain of SC16.4 IgG histidine scanning variant #15"
QIQLVQSGPELKKPGETVKISCKASGYTFTDYSMHWVKQAPGKGLKWMGWINTHTGEPGYADDFKGRFAFSLETSASTAYLQINNLKNEDTATYFCARYDGYAMDYWGQGTSVTVSS

SEQ ID NO: 136 - protein, 117 aa, Artificial Sequence
  source: /note="Description of Artificial Sequence: Synthetic polypeptide"
  source: /note="Heavy Chain of SC16.4 IgG histidine scanning variant #16"
QIQLVQSGPELKKPGETVKISCKASGYTFTDYSMHWVKQAPGKGLKWMGWINTEHGEPGYADDFKGRFAFSLETSASTAYLQINNLKNEDTATYFCARYDGYAMDYWGQGTSVTVSS

SEQ ID NO: 137 - protein, 117 aa, Artificial Sequence
  source: /note="Description of Artificial Sequence: Synthetic polypeptide"
  source: /note="Heavy Chain of SC16.4 IgG histidine scanning variant #17"
QIQLVQSGPELKKPGETVKISCKASGYTFTDYSMHWVKQAPGKGLKWMGWINTETHEPGYADDFKGRFAFSLETSASTAYLQINNLKNEDTATYFCARYDGYAMDYWGQGTSVTVSS

SEQ ID NO: 138 - protein, 117 aa, Artificial Sequence
  source: /note="Description of Artificial Sequence: Synthetic polypeptide"
  source: /note="Heavy Chain of SC16.4 IgG histidine scanning variant #18"
QIQLVQSGPELKKPGETVKISCKASGYTFTDYSMHWVKQAPGKGLKWMGWINTETGHPGYADDFKGRFAFSLETSASTAYLQINNLKNEDTATYFCARYDGYAMDYWGQGTSVTVSS

SEQ ID NO: 139 - protein, 117 aa, Artificial Sequence
  source: /note="Description of Artificial Sequence: Synthetic polypeptide"
  source: /note="Heavy Chain of SC16.4 IgG histidine scanning variant #19"
QIQLVQSGPELKKPGETVKISCKASGYTFTDYSMHWVKQAPGKGLKWMGWINTETGEHGYADDFKGRFAFSLETSASTAYLQINNLKNEDTATYFCARYDGYAMDYWGQGTSVTVSS

SEQ ID NO: 140 - protein, 117 aa, Artificial Sequence
  source: /note="Description of Artificial Sequence: Synthetic polypeptide"
  source: /note="Heavy Chain of SC16.4 IgG histidine scanning variant #20"
QIQLVQSGPELKKPGETVKISCKASGYTFTDYSMHWVKQAPGKGLKWMGWINTETGEPHYADDFKGRFAFSLETSASTAYLQINNLKNEDTATYFCARYDGYAMDYWGQGTSVTVSS

SEQ ID NO: 141 - protein, 117 aa, Artificial Sequence
  source: /note="Description of Artificial Sequence: Synthetic polypeptide"
  source: /note="Heavy Chain of SC16.4 IgG histidine scanning variant #21"
QIQLVQSGPELKKPGETVKISCKASGYTFTDYSMHWVKQAPGKGLKWMGWINTETGEPGHADDFKGRFAFSLETSASTAYLQINNLKNEDTATYFCARYDGYAMDYWGQGTSVTVSS

SEQ ID NO: 142 - protein, 117 aa, Artificial Sequence
  source: /note="Description of Artificial Sequence: Synthetic polypeptide"
  source: /note="Heavy Chain of SC16.4 IgG histidine scanning variant #22"
QIQLVQSGPELKKPGETVKISCKASGYTFTDYSMHWVKQAPGKGLKWMGWINTETGEPGYHDDFKGRFAFSLETSASTAYLQINNLKNEDTATYFCARYDGYAMDYWGQGTSVTVSS

SEQ ID NO: 143 - protein, 117 aa, Artificial Sequence
  source: /note="Description of Artificial Sequence: Synthetic polypeptide"
  source: /note="Heavy Chain of SC16.4 IgG histidine scanning variant #23"
QIQLVQSGPELKKPGETVKISCKASGYTFTDYSMHWVKQAPGKGLKWMGWINTETGEPGYAHDFKGRFAFSLETSASTAYLQINNLKNEDTATYFCARYDGYAMDYWGQGTSVTVSS

SEQ ID NO: 144 - protein, 117 aa, Artificial Sequence
  source: /note="Description of Artificial Sequence: Synthetic polypeptide"
  source: /note="Heavy Chain of SC16.4 IgG histidine scanning variant #24"
QIQLVQSGPELKKPGETVKISCKASGYTFTDYSMHWVKQAPGKGLKWMGWINTETGEPGYADHFKGRFAFSLETSASTAYLQINNLKNEDTATYFCARYDGYAMDYWGQGTSVTVSS

SEQ ID NO: 145 - protein, 117 aa, Artificial Sequence
  source: /note="Description of Artificial Sequence: Synthetic polypeptide"
  source: /note="Heavy Chain of SC16.4 IgG histidine scanning variant #25"
QIQLVQSGPELKKPGETVKISCKASGYTFTDYSMHWVKQAPGKGLKWMGWINTETGEPGYADDHKGRFAFSLETSASTAYLQINNLKNEDTATYFCARYDGYAMDYWGQGTSVTVSS

SEQ ID NO: 146 - protein, 117 aa, Artificial Sequence
  source: /note="Description of Artificial Sequence: Synthetic polypeptide"
  source: /note="Heavy Chain of SC16.4 IgG histidine scanning variant #26"
QIQLVQSGPELKKPGETVKISCKASGYTFTDYSMHWVKQAPGKGLKWMGWINTETGEPGYADDFHGRFAFSLETSASTAYLQINNLKNEDTATYFCARYDGYAMDYWGQGTSVTVSS

SEQ ID NO: 147 - protein, 117 aa, Artificial Sequence
  source: /note="Description of Artificial Sequence: Synthetic polypeptide"
  source: /note="Heavy Chain of SC16.4 IgG histidine scanning variant #27"
QIQLVQSGPELKKPGETVKISCKASGYTFTDYSMHWVKQAPGKGLKWMGWINTETGEPGYADDFKHRFAFSLETSASTAYLQINNLKNEDTATYFCARYDGYAMDYWGQGTSVTVSS

SEQ ID NO: 148 - protein, 117 aa, Artificial Sequence
  source: /note="Description of Artificial Sequence: Synthetic polypeptide"
  source: /note="Heavy Chain of SC16.4 IgG histidine scanning variant #28"
QIQLVQSGPELKKPGETVKISCKASGYTFTDYSMHWVKQAPGKGLKWMGWINTETGEPGYADDFKGRFAFSLETSASTAYLQINNLKNEDTATYFCHRYDGYAMDYWGQGTSVTVSS

SEQ ID NO: 149 - protein, 117 aa, Artificial Sequence
  source: /note="Description of Artificial Sequence: Synthetic polypeptide"
  source: /note="Heavy Chain of SC16.4 IgG histidine scanning variant #29"
QIQLVQSGPELKKPGETVKISCKASGYTFTDYSMHWVKQAPGKGLKWMGWINTETGEPGYADDFKGRFAFSLETSASTAYLQINNLKNEDTATYFCAHYDGYAMDYWGQGTSVTVSS

SEQ ID NO: 150 - protein, 117 aa, Artificial Sequence
  source: /note="Description of Artificial Sequence: Synthetic polypeptide"
  source: /note="Heavy Chain of SC16.4 IgG histidine scanning variant #30"
QIQLVQSGPELKKPGETVKISCKASGYTFTDYSMHWVKQAPGKGLKWMGWINTETGEPGYADDFKGRFAFSLETSASTAYLQINNLKNEDTATYFCARHDGYAMDYWGQGTSVTVSS

SEQ ID NO: 151 - protein, 117 aa, Artificial Sequence
  source: /note="Description of Artificial Sequence: Synthetic polypeptide"
  source: /note="Heavy Chain of SC16.4 IgG histidine scanning variant #31"
QIQLVQSGPELKKPGETVKISCKASGYTFTDYSMHWVKQAPGKGLKWMGWINTETGEPGYADDFKGRFAFSLETSASTAYLQINNLKNEDTATYFCARYHGYAMDYWGQGTSVTVSS

SEQ ID NO: 152 - protein, 117 aa, Artificial Sequence
  source: /note="Description of Artificial Sequence: Synthetic polypeptide"
  source: /note="Heavy Chain of SC16.4 IgG histidine scanning variant #32"
QIQLVQSGPELKKPGETVKISCKASGYTFTDYSMHWVKQAPGKGLKWMGWINTETGEPGYADDFKGRFAFSLETSASTAYLQINNLKNEDTATYFCARYDHYAMDYWGQGTSVTVSS

SEQ ID NO: 153 - protein, 117 aa, Artificial Sequence
  source: /note="Description of Artificial Sequence: Synthetic polypeptide"
  source: /note="Heavy Chain of SC16.4 IgG histidine scanning variant #33"
QIQLVQSGPELKKPGETVKISCKASGYTFTDYSMHWVKQAPGKGLKWMGWINTETGEPGYADDFKGRFAFSLETSASTAYLQINNLKNEDTATYFCARYDGHAMDYWGQGTSVTVSS

SEQ ID NO: 154 - protein, 117 aa, Artificial Sequence
  source: /note="Description of Artificial Sequence: Synthetic polypeptide"
  source: /note="Heavy Chain of SC16.4 IgG histidine scanning variant #34"
QIQLVQSGPELKKPGETVKISCKASGYTFTDYSMHWVKQAPGKGLKWMGWINTETGEPGYADDFKGRFAFSLETSASTAYLQINNLKNEDTATYFCARYDGYHMDYWGQGTSVTVSS

SEQ ID NO: 155 - protein, 117 aa, Artificial Sequence
  source: /note="Description of Artificial Sequence: Synthetic polypeptide"
  source: /note="Heavy Chain of SC16.4 IgG histidine scanning variant #35"
QIQLVQSGPELKKPGETVKISCKASGYTFTDYSMHWVKQAPGKGLKWMGWINTETGEPGYADDFKGRFAFSLETSASTAYLQINNLKNEDTATYFCARYDGYAHDYWGQGTSVTVSS

SEQ ID NO: 156 - protein, 117 aa, Artificial Sequence
  source: /note="Description of Artificial Sequence: Synthetic polypeptide"
  source: /note="Heavy Chain of SC16.4 IgG histidine scanning variant #36"
QIQLVQSGPELKKPGETVKISCKASGYTFTDYSMHWVKQAPGKGLKWMGWINTETGEPGYADDFKGRFAFSLETSASTAYLQINNLKNEDTATYFCARYDGYAMHYWGQGTSVTVSS

SEQ ID NO: 157 - protein, 117 aa, Artificial Sequence
  source: /note="Description of Artificial Sequence: Synthetic polypeptide"
  source: /note="Heavy Chain of SC16.4 IgG histidine scanning variant #37"
QIQLVQSGPELKKPGETVKISCKASGYTFTDYSMHWVKQAPGKGLKWMGWINTETGEPGYADDFKGRFAFSLETSASTAYLQINNLKNEDTATYFCARYDGYAMDHWGQGTSVTVSS

SEQ ID NO: 158 - protein, 107 aa, Artificial Sequence
  source: /note="Description of Artificial Sequence: Synthetic polypeptide"
  source: /note="Light Chain of SC16.4 IgG histidine scanning variant #1"
DIQMTQTTSSLSASLGDRVTISCHASQDISNYLNWYQQKPDGTVKLLIYYTSRLHSGVPSRFSGSGSGTDYSLTISNLELEDIATYFCQQGDMLPWTFGGGTKLEIK

SEQ ID NO: 159 - protein, 107 aa, Artificial Sequence
  source: /note="Description of Artificial Sequence: Synthetic polypeptide"
  source: /note="Light Chain of SC16.4 IgG histidine scanning variant #2"
DIQMTQTTSSLSASLGDRVTISCRHSQDISNYLNWYQQKPDGTVKLLIYYTSRLHSGVPSRFSGSGSGTDYSLTISNLELEDIATYFCQQGDMLPWTFGGGTKLEIK

SEQ ID NO: 160 - protein, 107 aa, Artificial Sequence
  source: /note="Description of Artificial Sequence: Synthetic polypeptide"
  source: /note="Light Chain of SC16.4 IgG histidine scanning variant #3"
DIQMTQTTSSLSASLGDRVTISCRAHQDISNYLNWYQQKPDGTVKLLIYYTSRLHSGVPSRFSGSGSGTDYSLTISNLELEDIATYFCQQGDMLPWTFGGGTKLEIK

SEQ ID NO: 161 - protein, 107 aa, Artificial Sequence
  source: /note="Description of Artificial Sequence: Synthetic polypeptide"
  source: /note="Light Chain of SC16.4 IgG histidine scanning variant #4"
DIQMTQTTSSLSASLGDRVTISCRASHDISNYLNWYQQKPDGTVKLLIYYTSRLHSGVPSRFSGSGSGTDYSLTISNLELEDIATYFCQQGDMLPWTFGGGTKLEIK

SEQ ID NO: 162 - protein, 107 aa, Artificial Sequence
  source: /note="Description of Artificial Sequence: Synthetic polypeptide"
  source: /note="Light Chain of SC16.4 IgG histidine scanning variant #5"
DIQMTQTTSSLSASLGDRVTISCRASQHISNYLNWYQQKPDGTVKLLIYYTSRLHSGVPSRFSGSGSGTDYSLTISNLELEDIATYFCQQGDMLPWTFGGGTKLEIK

SEQ ID NO: 163 - protein, 107 aa, Artificial Sequence
  source: /note="Description of Artificial Sequence: Synthetic polypeptide"
  source: /note="Light Chain of SC16.4 IgG histidine scanning variant #6"
DIQMTQTTSSLSASLGDRVTISCRASQDHSNYLNWYQQKPDGTVKLLIYYTSRLHSGVPSRFSGSGSGTDYSLTISNLELEDIATYFCQQGDMLPWTFGGGTKLEIK

SEQ ID NO: 164 - protein, 107 aa, Artificial Sequence
  source: /note="Description of Artificial Sequence: Synthetic polypeptide"
  source: /note="Light Chain of SC16.4 IgG histidine scanning variant #7"
DIQMTQTTSSLSASLGDRVTISCRASQDIHNYLNWYQQKPDGTVKLLIYYTSRLHSGVPSRFSGSGSGTDYSLTISNLELEDIATYFCQQGDMLPWTFGGGTKLEIK

SEQ ID NO: 165 - protein, 107 aa, Artificial Sequence
  source: /note="Description of Artificial Sequence: Synthetic polypeptide"
  source: /note="Light Chain of SC16.4 IgG histidine scanning variant #8"
DIQMTQTTSSLSASLGDRVTISCRASQDISHYLNWYQQKPDGTVKLLIYYTSRLHSGVPSRFSGSGSGTDYSLTISNLELEDIATYFCQQGDMLPWTFGGGTKLEIK

SEQ ID NO: 166 - protein, 107 aa, Artificial Sequence
  source: /note="Description of Artificial Sequence: Synthetic polypeptide"
  source: /note="Light Chain of SC16.4 IgG histidine scanning variant #9"
DIQMTQTTSSLSASLGDRVTISCRASQDISNHLNWYQQKPDGTVKLLIYYTSRLHSGVPSRFSGSGSGTDYSLTISNLELEDIATYFCQQGDMLPWTFGGGTKLEIK

SEQ ID NO: 167 - protein, 107 aa, Artificial Sequence
  source: /note="Description of Artificial Sequence: Synthetic polypeptide"
  source: /note="Light Chain of SC16.4 IgG histidine scanning variant #10"
DIQMTQTTSSLSASLGDRVTISCRASQDISNYHNWYQQKPDGTVKLLIYYTSRLHSGVPSRFSGSGSGTDYSLTISNLELEDIATYFCQQGDMLPWTFGGGTKLEIK

SEQ ID NO: 168 - protein, 107 aa, Artificial Sequence
  source: /note="Description of Artificial Sequence: Synthetic polypeptide"
  source: /note="Light Chain of SC16.4 IgG histidine scanning variant #11"
DIQMTQTTSSLSASLGDRVTISCRASQDISNYLHWYQQKPDGTVKLLIYYTSRLHSGVPSRFSGSGSGTDYSLTISNLELEDIATYFCQQGDMLPWTFGGGTKLEIK

SEQ ID NO: 169 - protein, 107 aa, Artificial Sequence
  source: /note="Description of Artificial Sequence: Synthetic polypeptide"
  source: /note="Light Chain of SC16.4 IgG histidine scanning variant #12"
DIQMTQTTSSLSASLGDRVTISCRASQDISNYLNWYQQKPDGTVKLLIYYHSRLHSGVPSRFSGSGSGTDYSLTISNLELEDIATYFCQQGDMLPWTFGGGTKLEIK

SEQ ID NO: 170 - protein, 107 aa, Artificial Sequence
  source: /note="Description of Artificial Sequence: Synthetic polypeptide"
  source: /note="Light Chain of SC16.4 IgG histidine scanning variant #13"
DIQMTQTTSSLSASLGDRVTISCRASQDISNYLNWYQQKPDGTVKLLIYYTHRLHSGVPSRFSGSGSGTDYSLTISNLELEDIATYFCQQGDMLPWTFGGGTKLEIK

SEQ ID NO: 171 - protein, 107 aa, Artificial Sequence
  source: /note="Description of Artificial Sequence: Synthetic polypeptide"
  source: /note="Light Chain of SC16.4 IgG histidine scanning variant #14"
DIQMTQTTSSLSASLGDRVTISCRASQDISNYLNWYQQKPDGTVKLLIYYTSHLHSGVPSRFSGSGSGTDYSLTISNLELEDIATYFCQQGDMLPWTFGGGTKLEIK

SEQ ID NO: 172 - protein, 107 aa, Artificial Sequence
  source: /note="Description of Artificial Sequence: Synthetic polypeptide"
  source: /note="Light Chain of SC16.4 IgG histidine scanning variant #15"
DIQMTQTTSSLSASLGDRVTISCRASQDISNYLNWYQQKPDGTVKLLIYYTSRHHSGVPSRFSGSGSGTDYSLTISNLELEDIATYFCQQGDMLPWTFGGGTKLEIK

SEQ ID NO: 173 - protein, 107 aa, Artificial Sequence
  source: /note="Description of Artificial Sequence: Synthetic polypeptide"
  source: /note="Light Chain of SC16.4 IgG histidine scanning variant #16"
DIQMTQTTSSLSASLGDRVTISCRASQDISNYLNWYQQKPDGTVKLLIYYTSRLASGVPSRFSGSGSGTDYSLTISNLELEDIATYFCQQGDMLPWTFGGGTKLEIK

SEQ ID NO: 174 - protein, 107 aa, Artificial Sequence
  source: /note="Description of Artificial Sequence: Synthetic polypeptide"
  source: /note="Light Chain of SC16.4 IgG histidine scanning variant #17"
DIQMTQTTSSLSASLGDRVTISCRASQDISNYLNWYQQKPDGTVKLLIYYTSRLHHGVPSRFSGSGSGTDYSLTISNLELEDIATYFCQQGDMLPWTFGGGTKLEIK

SEQ ID NO: 175 - protein, 107 aa, Artificial Sequence
  source: /note="Description of Artificial Sequence: Synthetic polypeptide"
  source: /note="Light Chain of SC16.4 IgG histidine scanning variant #18"
DIQMTQTTSSLSASLGDRVTISCRASQDISNYLNWYQQKPDGTVKLLIYYTSRLHSGVPSRFSGSGSGTDYSLTISNLELEDIATYFCHQGDMLPWTFGGGTKLEIK

SEQ ID NO: 176 - protein, 107 aa, Artificial Sequence
  source: /note="Description of Artificial Sequence: Synthetic polypeptide"
  source: /note="Light Chain of SC16.4 IgG histidine scanning variant #19"
DIQMTQTTSSLSASLGDRVTISCRASQDISNYLNWYQQKPDGTVKLLIYYTSRLHSGVPSRFSGSGSGTDYSLTISNLELEDIATYFCQHGDMLPWTFGGGTKLEIK

SEQ ID NO: 177 - protein, 107 aa, Artificial Sequence
  source: /note="Description of Artificial Sequence: Synthetic polypeptide"
  source: /note="Light Chain of SC16.4 IgG histidine scanning variant #20"
DIQMTQTTSSLSASLGDRVTISCRASQDISNYLNWYQQKPDGTVKLLIYYTSRLHSGVPSRFSGSGSGTDYSLTISNLELEDIATYFCQQHDMLPWTFGGGTKLEIK

SEQ ID NO: 178 - protein, 107 aa, Artificial Sequence
  source: /note="Description of Artificial Sequence: Synthetic polypeptide"
  source: /note="Light Chain of SC16.4 IgG histidine scanning variant #21"
DIQMTQTTSSLSASLGDRVTISCRASQDISNYLNWYQQKPDGTVKLLIYYTSRLHSGVPSRFSGSGSGTDYSLTISNLELEDIATYFCQQGHMLPWTFGGGTKLEIK

SEQ ID NO: 179 - protein, 107 aa, Artificial Sequence
  source: /note="Description of Artificial Sequence: Synthetic polypeptide"
  source: /note="Light Chain of SC16.4 IgG histidine scanning variant #22"
DIQMTQTTSSLSASLGDRVTISCRASQDISNYLNWYQQKPDGTVKLLIYYTSRLHSGVPSRFSGSGSGTDYSLTISNLELEDIATYFCQQGDHLPWTFGGGTKLEIK

SEQ ID NO: 180 - protein, 107 aa, Artificial Sequence
  source: /note="Description of Artificial Sequence: Synthetic polypeptide"
  source: /note="Light Chain of SC16.4 IgG histidine scanning variant #23"
DIQMTQTTSSLSASLGDRVTISCRASQDISNYLNWYQQKPDGTVKLLIYYTSRLHSGVPSRFSGSGSGTDYSLTISNLELEDIATYFCQQGDMHPWTFGGGTKLEIK

SEQ ID NO: 181 - protein, 107 aa, Artificial Sequence
  source: /note="Description of Artificial Sequence: Synthetic polypeptide"
  source: /note="Light Chain of SC16.4 IgG histidine scanning variant #24"
DIQMTQTTSSLSASLGDRVTISCRASQDISNYLNWYQQKPDGTVKLLIYYTSRLHSGVPSRFSGSGSGTDYSLTISNLELEDIATYFCQQGDMLHWTFGGGTKLEIK

SEQ ID NO: 182 - protein, 107 aa, Artificial Sequence
  source: /note="Description of Artificial Sequence: Synthetic polypeptide"
  source: /note="Light Chain of SC16.4 IgG histidine scanning variant #25"
DIQMTQTTSSLSASLGDRVTISCRASQDISNYLNWYQQKPDGTVKLLIYYTSRLHSGVPSRFSGSGSGTDYSLTISNLELEDIATYFCQQGDMLPHTFGGGTKLEIK

SEQ ID NO: 183 - protein, 107 aa, Artificial Sequence
  source: /note="Description of Artificial Sequence: Synthetic polypeptide"
  source: /note="Light Chain of SC16.4 IgG histidine scanning variant #26"
DIQMTQTTSSLSASLGDRVTISCRASQDISNYLNWYQQKPDGTVKLLIYYTSRLHSGVPSRFSGSGSGTDYSLTISNLELEDIATYFCQQGDMLPWHFGGGTKLEIK

SEQ ID NO: 184 - protein, 107 aa, Artificial Sequence
  source: /note="Description of Artificial Sequence: Synthetic polypeptide"
  source: /note="Light Chain of SC16.4 IgG histidine scanning variant #27"
DIQMTQTTSSLSASLGDRVTISCRASQDISNYLNWYQQKPDGTVKLLIYHTSRLHSGVPSRFSGSGSGTDYSLTISNLELEDIATYFCQQGDMLPWTFGGGTKLEIK

SEQ ID NO: 185 - protein, 117 aa, Artificial Sequence
  source: /note="Description of Artificial Sequence: Synthetic polypeptide"
  source: /note="Heavy Chain Combinations of SC16.4 IgG histidine scanning variant #1"
QIQLVQSGPELKKPGETVKISCKASGYTFTDHSMHWVKQAPGKGLKWMGWINTETGHPGYADDFKGRFAFSLETSASTAYLQINNLKNEDTATYFCARYDGYAMDYWGQGTSVTVSS

SEQ ID NO: 186 - protein, 117 aa, Artificial Sequence
  source: /note="Description of Artificial Sequence: Synthetic polypeptide"
  source: /note="Heavy Chain Combinations of SC16.4 IgG histidine scanning variant #2"
QIQLVQSGPELKKPGETVKISCKASGYTFTDHSMHWVKQAPGKGLKWMGWINTETGEPGYAHDFKGRFAFSLETSASTAYLQINNLKNEDTATYFCARYDGYAMDYWGQGTSVTVSS

SEQ ID NO: 187 - protein, 117 aa, Artificial Sequence
  source: /note="Description of Artificial Sequence: Synthetic polypeptide"
  source: /note="Heavy Chain Combinations of SC16.4 IgG histidine scanning variant #3"
QIQLVQSGPELKKPGETVKISCKASGYTFTDHSMHWVKQAPGKGLKWMGWINTETGEPGYADDFKGRFAFSLETSASTAYLQINNLKNEDTATYFCARHDGYAMDYWGQGTSVTVSS

SEQ ID NO: 188 - protein, 117 aa, Artificial Sequence
  source: /note="Description of Artificial Sequence: Synthetic polypeptide"
  source: /note="Heavy Chain Combinations of SC16.4 IgG histidine scanning variant #4"
QIQLVQSGPELKKPGETVKISCKASGYTFTDHSMHWVKQAPGKGLKWMGWINTETGEPGYADDFKGRFAFSLETSASTAYLQINNLKNEDTATYFCARYDGYAMHYWGQGTSVTVSS

SEQ ID NO: 189 - protein, 117 aa, Artificial Sequence
  source: /note="Description of Artificial Sequence: Synthetic polypeptide"
  source: /note="Heavy Chain Combinations of SC16.4 IgG histidine scanning variant #5"
QIQLVQSGPELKKPGETVKISCKASGYTFTDYSMHWVKQAPGKGLKWMGWINTETGHPGYAHDFKGRFAFSLETSASTAYLQINNLKNEDTATYFCARYDGYAMDYWGQGTSVTVSS

SEQ ID NO: 190 - protein, 117 aa, Artificial Sequence
  source: /note="Description of Artificial Sequence: Synthetic polypeptide"
  source: /note="Heavy Chain Combinations of SC16.4 IgG histidine scanning variant #6"
QIQLVQSGPELKKPGETVKISCKASGYTFTDYSMHWVKQAPGKGLKWMGWINTETGHPGYADDFKGRFAFSLETSASTAYLQINNLKNEDTATYFCARHDGYAMDYWGQGTSVTVSS

SEQ ID NO: 191 - protein, 117 aa, Artificial Sequence
  source: /note="Description of Artificial Sequence: Synthetic polypeptide"
  source: /note="Heavy Chain Combinations of SC16.4 IgG histidine scanning variant #7"
QIQLVQSGPELKKPGETVKISCKASGYTFTDYSMHWVKQAPGKGLKWMGWINTETGHPGYADDFKGRFAFSLETSASTAYLQINNLKNEDTATYFCARYDGYAMHYWGQGTSVTVSS

SEQ ID NO: 192 - protein, 117 aa, Artificial Sequence
  source: /note="Description of Artificial Sequence: Synthetic polypeptide"
  source: /note="Heavy Chain Combinations of SC16.4 IgG histidine scanning variant #8"
QIQLVQSGPELKKPGETVKISCKASGYTFTDYSMHWVKQAPGKGLKWMGWINTETGEPGYAHDFKGRFAFSLETSASTAYLQINNLKNEDTATYFCARHDGYAMDYWGQGTSVTVSS

SEQ ID NO: 193 - protein, 117 aa, Artificial Sequence
  source: /note="Description of Artificial Sequence: Synthetic polypeptide"
  source: /note="Heavy Chain Combinations of SC16.4 IgG histidine scanning variant #9"
QIQLVQSGPELKKPGETVKISCKASGYTFTDYSMHWVKQAPGKGLKWMGWINTETGEPGYAHDFKGRFAFSLETSASTAYLQINNLKNEDTATYFCARYDGYAMHYWGQGTSVTVSS

SEQ ID NO: 194 - protein, 117 aa, Artificial Sequence
  source: /note="Description of Artificial Sequence: Synthetic polypeptide"
  source: /note="Heavy Chain Combinations of SC16.4 IgG histidine scanning variant #10"
QIQLVQSGPELKKPGETVKISCKASGYTFTDYSMHWVKQAPGKGLKWMGWINTETGEPGYADDFKGRFAFSLETSASTAYLQINNLKNEDTATYFCARHDGYAMHYWGQGTSVTVSS

SEQ ID NO: 195 - protein, 117 aa, Artificial Sequence
  source: /note="Description of Artificial Sequence: Synthetic polypeptide"
  source: /note="Heavy Chain Combinations of SC16.4 IgG histidine scanning variant #11"
QIQLVQSGPELKKPGETVKISCKASGYTFTDHSMHWVKQAPGKGLKWMGWINTETGHPGYAHDFKGRFAFSLETSASTAYLQINNLKNEDTATYFCARYDGYAMDYWGQGTSVTVSS

SEQ ID NO: 196 - protein, 117 aa, Artificial Sequence
  source: /note="Description of Artificial Sequence: Synthetic polypeptide"
  source: /note="Heavy Chain Combinations of SC16.4 IgG histidine scanning variant #12"
QIQLVQSGPELKKPGETVKISCKASGYTFTDHSMHWVKQAPGKGLKWMGWINTETGHPGYADDFKGRFAFSLETSASTAYLQINNLKNEDTATYFCARHDGYAMDYWGQGTSVTVSS

SEQ ID NO: 197 - protein, 117 aa, Artificial Sequence
  source: /note="Description of Artificial Sequence: Synthetic polypeptide"
  source: /note="Heavy Chain Combinations of SC16.4 IgG histidine scanning variant #13"
QIQLVQSGPELKKPGETVKISCKASGYTFTDHSMHWVKQAPGKGLKWMGWINTETGHPGYADDFKGRFAFSLETSASTAYLQINNLKNEDTATYFCARYDGYAMHYWGQGTSVTVSS

SEQ ID NO: 198 - protein, 117 aa, Artificial Sequence
  source: /note="Description of Artificial Sequence: Synthetic polypeptide"
  source: /note="Heavy Chain Combinations of SC16.4 IgG histidine scanning variant #14"
QIQLVQSGPELKKPGETVKISCKASGYTFTDHSMHWVKQAPGKGLKWMGWINTETGEPGYAHDFKGRFAFSLETSASTAYLQINNLKNEDTATYFCARHDGYAMDYWGQGTSVTVSS

SEQ ID NO: 199 - protein, 117 aa, Artificial Sequence
  source: /note="Description of Artificial Sequence: Synthetic polypeptide"
  source: /note="Heavy Chain Combinations of SC16.4 IgG histidine scanning variant #15"
QIQLVQSGPELKKPGETVKISCKASGYTFTDHSMHWVKQAPGKGLKWMGWINTETGEPGYAHDFKGRFAFSLETSASTAYLQINNLKNEDTATYFCARYDGYAMHYWGQGTSVTVSS

SEQ ID NO: 200 - protein, 117 aa, Artificial Sequence
  source: /note="Description of Artificial Sequence: Synthetic polypeptide"
  source: /note="Heavy Chain Combinations of SC16.4 IgG histidine scanning variant #16"
QIQLVQSGPELKKPGETVKISCKASGYTFTDHSMHWVKQAPGKGLKWMGWINTETGEPGYADDFKGRFAFSLETSASTAYLQINNLKNEDTATYFCARHDGYAMHYWGQGTSVTVSS

SEQ ID NO: 201 - protein, 117 aa, Artificial Sequence
  source: /note="Description of Artificial Sequence: Synthetic polypeptide"
  source: /note="Heavy Chain Combinations of SC16.4 IgG histidine scanning variant #17"
QIQLVQSGPELKKPGETVKISCKASGYTFTDYSMHWVKQAPGKGLKWMGWINTETGHPGYAHDFKGRFAFSLETSASTAYLQINNLKNEDTATYFCARHDGYAMDYWGQGTSVTVSS

SEQ ID NO: 202 - protein, 117 aa, Artificial Sequence
  source: /note="Description of Artificial Sequence: Synthetic polypeptide"
  source: /note="Heavy Chain Combinations of SC16.4 IgG histidine scanning variant #18"
QIQLVQSGPELKKPGETVKISCKASGYTFTDYSMHWVKQAPGKGLKWMGWINTETGHPGYAHDFKGRFAFSLETSASTAYLQINNLKNEDTATYFCARYDGYAMHYWGQGTSVTVSS

SEQ ID NO: 203 - protein, 117 aa, Artificial Sequence
  source: /note="Description of Artificial Sequence: Synthetic polypeptide"
  source: /note="Heavy Chain Combinations of SC16.4 IgG histidine scanning variant #19"
QIQLVQSGPELKKPGETVKISCKASGYTFTDYSMHWVKQAPGKGLKWMGWINTETGHPGYADDFKGRFAFSLETSASTAYLQINNLKNEDTATYFCARHDGYAMHYWGQGTSVTVSS

SEQ ID NO: 204 - protein, 117 aa, Artificial Sequence
  source: /note="Description of Artificial Sequence: Synthetic polypeptide"
  source: /note="Heavy Chain Combinations of SC16.4 IgG histidine scanning variant #20"
QIQLVQSGPELKKPGETVKISCKASGYTFTDYSMHWVKQAPGKGLKWMGWINTETGEPGYAHDFKGRFAFSLETSASTAYLQINNLKNEDTATYFCARHDGYAMHYWGQGTSVTVSS

SEQ ID NO: 205 - protein, 117 aa, Artificial Sequence
  source: /note="Description of Artificial Sequence: Synthetic polypeptide"
  source: /note="Heavy Chain Combinations of SC16.4 IgG histidine scanning variant #21"
QIQLVQSGPELKKPGETVKISCKASGYTFTDHSMHWVKQAPGKGLKWMGWINTETGHPGYAHDFKGRFAFSLETSASTAYLQINNLKNEDTATYFCARHDGYAMDYWGQGTSVTVSS

SEQ ID NO: 206 - protein, 117 aa, Artificial Sequence
  source: /note="Description of Artificial Sequence: Synthetic polypeptide"
  source: /note="Heavy Chain Combinations of SC16.4 IgG histidine scanning variant #22"
QIQLVQSGPELKKPGETVKISCKASGYTFTDHSMHWVKQAPGKGLKWMGWINTETGHPGYAHDFKGRFAFSLETSASTAYLQINNLKNEDTATYFCARYDGYAMHYWGQGTSVTVSS

SEQ ID NO: 207 - protein, 117 aa, Artificial Sequence
  source: /note="Description of Artificial Sequence: Synthetic polypeptide"
  source: /note="Heavy Chain Combinations of SC16.4 IgG histidine scanning variant #23"
QIQLVQSGPELKKPGETVKISCKASGYTFTDHSMHWVKQAPGKGLKWMGWINTETGHPGYADDFKGRFAFSLETSASTAYLQINNLKNEDTATYFCARHDGYAMHYWGQGTSVTVSS

SEQ ID NO: 208 - protein, 117 aa, Artificial Sequence
  source: /note="Description of Artificial Sequence: Synthetic polypeptide"
  source: /note="Heavy Chain Combinations of SC16.4 IgG histidine scanning variant #24"
QIQLVQSGPELKKPGETVKISCKASGYTFTDHSMHWVKQAPGKGLKWMGWINTETGEPGYAHDFKGRFAFSLETSASTAYLQINNLKNEDTATYFCARHDGYAMHYWGQGTSVTVSS

SEQ ID NO: 209 - protein, 117 aa, Artificial Sequence
  source: /note="Description of Artificial Sequence: Synthetic polypeptide"
  source: /note="Heavy Chain Combinations of SC16.4 IgG histidine scanning variant #25"
QIQLVQSGPELKKPGETVKISCKASGYTFTDYSMHWVKQAPGKGLKWMGWINTETGHPGYAHDFKGRFAFSLETSASTAYLQINNLKNEDTATYFCARHDGYAMHYWGQGTSVTVSS

SEQ ID NO: 210 - protein, 117 aa, Artificial Sequence
  source: /note="Description of Artificial Sequence: Synthetic polypeptide"
  source: /note="Heavy Chain Combinations of SC16.4 IgG histidine scanning variant #26"
QIQLVQSGPELKKPGETVKISCKASGYTFTDHSMHWVKQAPGKGLKWMGWINTETGHPGYAHDFKGRFAFSLETSASTAYLQINNLKNEDTATYFCARHDGYAMHYWGQGTSVTVSS

SEQ ID NO: 211 - protein, 117 aa, Artificial Sequence
  source: /note="Description of Artificial Sequence: Synthetic polypeptide"
  source: /note="Heavy Chain Combinations of SC16.4 IgG histidine scanning variant #27"
QIQLVQSGPELKKPGETVKISCKASGYTFTDHSMHWVKQAPGKGLKWMGWINTETGEPGYADDFKGRFAFSLETSASTAYLQINNLKNEDTATYFCARYHGYAMDYWGQGTSVTVSS

SEQ ID NO: 212 - protein, 117 aa, Artificial Sequence
  source: /note="Description of Artificial Sequence: Synthetic polypeptide"
  source: /note="Heavy Chain Combinations of SC16.4 IgG histidine scanning variant #28"
QIQLVQSGPELKKPGETVKISCKASGYTFTDYSMHWVKQAPGKGLKWMGWINTETGHPGYADDFKGRFAFSLETSASTAYLQINNLKNEDTATYFCARYHGYAMDYWGQGTSVTVSS

SEQ ID NO: 213 - protein, 117 aa, Artificial Sequence
  source: /note="Description of Artificial Sequence: Synthetic polypeptide"
  source: /note="Heavy Chain Combinations of SC16.4 IgG histidine scanning variant #29"
QIQLVQSGPELKKPGETVKISCKASGYTFTDYSMHWVKQAPGKGLKWMGWINTETGEPGYAHDFKGRFAFSLETSASTAYLQINNLKNEDTATYFCARYHGYAMDYWGQGTSVTVSS

SEQ ID NO: 214 - protein, 117 aa, Artificial Sequence
  source: /note="Description of Artificial Sequence: Synthetic polypeptide"
  source: /note="Heavy Chain Combinations of SC16.4 IgG histidine scanning variant #30"
QIQLVQSGPELKKPGETVKISCKASGYTFTDYSMHWVKQAPGKGLKWMGWINTETGEPGYADDFKGRFAFSLETSASTAYLQINNLKNEDTATYFCARHHGYAMDYWGQGTSVTVSS

SEQ ID NO: 215 - protein, 117 aa, Artificial Sequence
  source: /note="Description of Artificial Sequence: Synthetic polypeptide"
  source: /note="Heavy Chain Combinations of SC16.4 IgG histidine scanning variant #31"
QIQLVQSGPELKKPGETVKISCKASGYTFTDYSMHWVKQAPGKGLKWMGWINTETGEPGYADDFKGRFAFSLETSASTAYLQINNLKNEDTATYFCARYHGYAMHYWGQGTSVTVSS

SEQ ID NO: 216 - protein, 117 aa, Artificial Sequence
  source: /note="Description of Artificial Sequence: Synthetic polypeptide"
  source: /note="Heavy Chain Combinations of SC16.4 IgG histidine scanning variant #32"
QIQLVQSGPELKKPGETVKISCKASGYTFTDHSMHWVKQAPGKGLKWMGWINTETGHPGYADDFKGRFAFSLETSASTAYLQINNLKNEDTATYFCARYHGYAMDYWGQGTSVTVSS

SEQ ID NO: 217 - protein, 117 aa, Artificial Sequence
  source: /note="Description of Artificial Sequence: Synthetic polypeptide"
  source: /note="Heavy Chain Combinations of SC16.4 IgG histidine scanning variant #33"
QIQLVQSGPELKKPGETVKISCKASGYTFTDHSMHWVKQAPGKGLKWMGWINTETGEPGYAHDFKGRFAFSLETSASTAYLQINNLKNEDTATYFCARYHGYAMDYWGQGTSVTVSS

SEQ ID NO: 218 - protein, 117 aa, Artificial Sequence
  source: /note="Description of Artificial Sequence: Synthetic polypeptide"
  source: /note="Heavy Chain Combinations of SC16.4 IgG histidine scanning variant #34"
QIQLVQSGPELKKPGETVKISCKASGYTFTDHSMHWVKQAPGKGLKWMGWINTETGEPGYADDFKGRFAFSLETSASTAYLQINNLKNEDTATYFCARHHGYAMDYWGQGTSVTVSS

SEQ ID NO: 219 - protein, 117 aa, Artificial Sequence
  source: /note="Description of Artificial Sequence: Synthetic polypeptide"
  source: /note="Heavy Chain Combinations of SC16.4 IgG histidine scanning variant #35"
QIQLVQSGPELKKPGETVKISCKASGYTFTDHSMHWVKQAPGKGLKWMGWINTETGEPGYADDFKGRFAFSLETSASTAYLQINNLKNEDTATYFCARYHGYAMHYWGQGTSVTVSS

SEQ ID NO: 220 - protein, 117 aa, Artificial Sequence
  source: /note="Description of Artificial Sequence: Synthetic polypeptide"
  source: /note="Heavy Chain Combinations of SC16.4 IgG histidine scanning variant #36"
QIQLVQSGPELKKPGETVKISCKASGYTFTDYSMHWVKQAPGKGLKWMGWINTETGHPGYAHDFKGRFAFSLETSASTAYLQINNLKNEDTATYFCARYHGYAMDYWGQGTSVTVSS

SEQ ID NO: 221 - protein, 117 aa, Artificial Sequence
  source: /note="Description of Artificial Sequence: Synthetic polypeptide"
  source: /note="Heavy Chain Combinations of SC16.4 IgG histidine scanning variant #37"
QIQLVQSGPELKKPGETVKISCKASGYTFTDYSMHWVKQAPGKGLKWMGWINTETGHPGYADDFKGRFAFSLETSASTAYLQINNLKNEDTATYFCARHHGYAMDYWGQGTSVTVSS

SEQ ID NO: 222 - protein, 117 aa, Artificial Sequence
  source: /note="Description of Artificial Sequence: Synthetic polypeptide"
  source: /note="Heavy Chain Combinations of SC16.4 IgG histidine scanning variant #38"
QIQLVQSGPELKKPGETVKISCKASGYTFTDYSMHWVKQAPGKGLKWMGWINTETGHPGYADDFKGRFAFSLETSASTAYLQINNLKNEDTATYFCARYHGYAMHYWGQGTSVTVSS

SEQ ID NO: 223 - protein, 117 aa, Artificial Sequence
  source: /note="Description of Artificial Sequence: Synthetic polypeptide"
  source: /note="Heavy Chain Combinations of SC16.4 IgG histidine scanning variant #39"
QIQLVQSGPELKKPGETVKISCKASGYTFTDYSMHWVKQAPGKGLKWMGWINTETGEPGYAHDFKGRFAFSLETSASTAYLQINNLKNEDTATYFCARHHGYAMDYWGQGTSVTVSS

SEQ ID NO: 224 - protein, 117 aa, Artificial Sequence
  source: /note="Description of Artificial Sequence: Synthetic polypeptide"
  source: /note="Heavy Chain Combinations of SC16.4 IgG histidine scanning variant #40"
QIQLVQSGPELKKPGETVKISCKASGYTFTDYSMHWVKQAPGKGLKWMGWINTETGEPGYAHDFKGRFAFSLETSASTAYLQINNLKNEDTATYFCARYHGYAMHYWGQGTSVTVSS

SEQ ID NO: 225 - protein, 117 aa, Artificial Sequence
  source: /note="Description of Artificial Sequence: Synthetic polypeptide"
  source: /note="Heavy Chain Combinations of SC16.4 IgG histidine scanning variant #41"
QIQLVQSGPELKKPGETVKISCKASGYTFTDYSMHWVKQAPGKGLKWMGWINTETGEPGYADDFKGRFAFSLETSASTAYLQINNLKNEDTATYFCARHHGYAMHYWGQGTSVTVSS

SEQ ID NO: 226 - protein, 107 aa, Artificial Sequence
  source: /note="Description of Artificial Sequence: Synthetic polypeptide"
  source: /note="Light Chain Combinations of SC16.4 IgG histidine scanning variant #1"
DIQMTQTTSSLSASLGDRVTISCRASQDHSNHLNWYQQKPDGTVKLLIYYTSRLHSGVPSRFSGSGSGTDYSLTISNLELEDIATYFCQQGDMLPWTFGGGTKLEIK

SEQ ID NO: 227 - protein, 107 aa, Artificial Sequence
  source: /note="Description of Artificial Sequence: Synthetic polypeptide"
  source: /note="Light Chain Combinations of SC16.4 IgG histidine scanning variant #2"
DIQMTQTTSSLSASLGDRVTISCRASQDHSNYLHWYQQKPDGTVKLLIYYTSRLHSGVPSRFSGSGSGTDYSLTISNLELEDIATYFCQQGDMLPWTFGGGTKLEIK

SEQ ID NO: 228 - protein, 107 aa, Artificial Sequence
  source: /note="Description of Artificial Sequence: Synthetic polypeptide"
  source: /note="Light Chain Combinations of SC16.4 IgG histidine scanning variant #3"
DIQMTQTTSSLSASLGDRVTISCRASQDHSNYLNWYQQKPDGTVKLLIYYTSRLHSGVPSRFSGSGSGTDYSLTISNLELEDIATYFCQQGDHLPWTFGGGTKLEIK

SEQ ID NO: 229 - protein, 107 aa, Artificial Sequence
  source: /note="Description of Artificial Sequence: Synthetic polypeptide"
  source: /note="Light Chain Combinations of SC16.4 IgG histidine scanning variant #4"
DIQMTQTTSSLSASLGDRVTISCRASQDISNHLHWYQQKPDGTVKLLIYYTSRLHSGVPSRFSGSGSGTDYSLTISNLELEDIATYFCQQGDMLPWTFGGGTKLEIK

SEQ ID NO: 230 - protein, 107 aa, Artificial Sequence
  source: /note="Description of Artificial Sequence: Synthetic polypeptide"
  source: /note="Light Chain Combinations of SC16.4 IgG histidine scanning variant #5"
DIQMTQTTSSLSASLGDRVTISCRASQDISNHLNWYQQKPDGTVKLLIYYTSRLHSGVPSRFSGSGSGTDYSLTISNLELEDIATYFCQQGDHLPWTFGGGTKLEIK

SEQ ID NO: 231 - protein, 107 aa, Artificial Sequence
  source: /note="Description of Artificial Sequence: Synthetic polypeptide"
  source: /note="Light Chain Combinations of SC16.4 IgG histidine scanning variant #6"
DIQMTQTTSSLSASLGDRVTISCRASQDISNYLHWYQQKPDGTVKLLIYYTSRLHSGVPSRFSGSGSGTDYSLTISNLELEDIATYFCQQGDHLPWTFGGGTKLEIK

SEQ ID NO: 232 - protein, 107 aa, Artificial Sequence
  source: /note="Description of Artificial Sequence: Synthetic polypeptide"
  source: /note="Light Chain Combinations of SC16.4 IgG histidine scanning variant #7"
DIQMTQTTSSLSASLGDRVTISCRASQDHSNHLHWYQQKPDGTVKLLIYYTSRLHSGVPSRFSGSGSGTDYSLTISNLELEDIATYFCQQGDMLPWTFGGGTKLEIK

SEQ ID NO: 233 - protein, 107 aa, Artificial Sequence
  source: /note="Description of Artificial Sequence: Synthetic polypeptide"
  source: /note="Light Chain Combinations of SC16.4 IgG histidine scanning variant #8"
DIQMTQTTSSLSASLGDRVTISCRASQDHSNHLNWYQQKPDGTVKLLIYYTSRLHSGVPSRFSGSGSGTDYSLTISNLELEDIATYFCQQGDHLPWTFGGGTKLEIK

SEQ ID NO: 234 - protein, 107 aa, Artificial Sequence
  source: /note="Description of Artificial Sequence: Synthetic polypeptide"
  source: /note="Light Chain Combinations of SC16.4 IgG histidine scanning variant #9"
DIQMTQTTSSLSASLGDRVTISCRASQDHSNYLHWYQQKPDGTVKLLIYYTSRLHSGVPSRFSGSGSGTDYSLTISNLELEDIATYFCQQGDHLPWTFGGGTKLEIK

SEQ ID NO: 235 - protein, 107 aa, Artificial Sequence
  source: /note="Description of Artificial Sequence: Synthetic polypeptide"
  source: /note="Light Chain Combinations of SC16.4 IgG histidine scanning variant #10"
DIQMTQTTSSLSASLGDRVTISCRASQDISNHLHWYQQKPDGTVKLLIYYTSRLHSGVPSRFSGSGSGTDYSLTISNLELEDIATYFCQQGDHLPWTFGGGTKLEIK

SEQ ID NO: 236 - protein, 124 aa, Artificial Sequence
  source: /note="Description of Artificial Sequence: Synthetic polypeptide"
  source: /note="Heavy Chain of hSC16.13 IgG"
QITLKESGPTLVKPTQTLTLTCTFSGFSLSTSGMGVGWIRQPPGKALEWLAHIWWDDVKRYSPSLKSRLTITKDTSKNQVVLTMTNMDPVDTATYYCARIVSFDNDVVSAMDYWGQGTLVTVSS

SEQ ID NO: 237 - protein, 106 aa, Artificial Sequence
  source: /note="Description of Artificial Sequence: Synthetic polypeptide"
  source: /note="Light Chain of hSC16.13 IgG"
DIQMTQSPSSLSASVGDRVTITCSASSSVSYMYWYQQKPGKAPKLLIYLTSNLASGVPSRFSGSGSGTDFTLTISSLQPEDFATYYCQQWRSNPFTFGQGTKLEIK

SEQ ID NO: 238 - protein, 124 aa, Artificial Sequence
  source: /note="Description of Artificial Sequence: Synthetic polypeptide"
  source: /note="Heavy Chain of hSC16.13 IgG histidine scanning variant #1"
QITLKESGPTLVKPTQTLTLTCTFSHFSLSTSGMGVGWIRQPPGKALEWLAHIWWDDVKRYSPSLKSRLTITKDTSKNQVVLTMTNMDPVDTATYYCARIVSFDNDVVSAMDYWGQGTLVTVSS

SEQ ID NO: 239 - protein, 124 aa, Artificial Sequence
  source: /note="Description of Artificial Sequence: Synthetic polypeptide"
  source: /note="Heavy Chain of hSC16.13 IgG histidine scanning variant #2"
QITLKESGPTLVKPTQTLTLTCTFSGHSLSTSGMGVGWIRQPPGKALEWLAHIWWDDVKRYSPSLKSRLTITKDTSKNQVVLTMTNMDPVDTATYYCARIVSFDNDVVSAMDYWGQGTLVTVSS

SEQ ID NO: 240 - protein, 124 aa, Artificial Sequence
  source: /note="Description of Artificial Sequence: Synthetic polypeptide"
  source: /note="Heavy Chain of hSC16.13 IgG histidine scanning variant #3"
QITLKESGPTLVKPTQTLTLTCTFSGFHLSTSGMGVGWIRQPPGKALEWLAHIWWDDVKRYSPSLKSRLTITKDTSKNQVVLTMTNMDPVDTATYYCARIVSFDNDVVSAMDYWGQGTLVTVSS

SEQ ID NO: 241 - protein, 124 aa, Artificial Sequence
  source: /note="Description of Artificial Sequence: Synthetic polypeptide"
  source: /note="Heavy Chain of hSC16.13 IgG histidine scanning variant #4"
QITLKESGPTLVKPTQTLTLTCTFSGFSHSTSGMGVGWIRQPPGKALEWLAHIWWDDVKRYSPSLKSRLTITKDTSKNQVVLTMTNMDPVDTATYYCARIVSFDNDVVSAMDYWGQGTLVTVSS

SEQ ID NO: 242 - protein, 124 aa, Artificial Sequence
  source: /note="Description of Artificial Sequence: Synthetic polypeptide"
  source: /note="Heavy Chain of hSC16.13 IgG histidine scanning variant #5"
QITLKESGPTLVKPTQTLTLTCTFSGFSLHTSGMGVGWIRQPPGKALEWLAHIWWDDVKRYSPSLKSRLTITKDTSKNQVVLTMTNMDPVDTATYYCARIVSFDNDVVSAMDYWGQGTLVTVSS

SEQ ID NO: 243 - protein, 124 aa, Artificial Sequence
  source: /note="Description of Artificial Sequence: Synthetic polypeptide"
  source: /note="Heavy Chain of hSC16.13 IgG histidine scanning variant #6"
QITLKESGPTLVKPTQTLTLTCTFSGFSLSHSGMGVGWIRQPPGKALEWLAHIWWDDVKRYSPSLKSRLTITKDTSKNQVVLTMTNMDPVDTATYYCARIVSFDNDVVSAMDYWGQGTLVTVSS

SEQ ID NO: 244 - protein, 124 aa, Artificial Sequence
  source: /note="Description of Artificial Sequence: Synthetic polypeptide"
  source: /note="Heavy Chain of hSC16.13 IgG histidine scanning variant #7"
QITLKESGPTLVKPTQTLTLTCTFSGFSLSTHGMGVGWIRQPPGKALEWLAHIWWDDVKRYSPSLKSRLTITKDTSKNQVVLTMTNMDPVDTATYYCARIVSFDNDVVSAMDYWGQGTLVTVSS

SEQ ID NO: 245 - protein, 124 aa, Artificial Sequence
  source: /note="Description of Artificial Sequence: Synthetic polypeptide"
  source: /note="Heavy Chain of hSC16.13 IgG histidine scanning variant #8"
QITLKESGPTLVKPTQTLTLTCTFSGFSLSTSHMGVGWIRQPPGKALEWLAHIWWDDVKRYSPSLKSRLTITKDTSKNQVVLTMTNMDPVDTATYYCARIVSFDNDVVSAMDYWGQGTLVTVSS

SEQ ID NO: 246 - protein, 124 aa, Artificial Sequence
  source: /note="Description of Artificial Sequence: Synthetic polypeptide"
  source: /note="Heavy Chain of hSC16.13 IgG histidine scanning variant #9"
QITLKESGPTLVKPTQTLTLTCTFSGFSLSTSGHGVGWIRQPPGKALEWLAHIWWDDVKRYSPSLKSRLTITKDTSKNQVVLTMTNMDPVDTATYYCARIVSFDNDVVSAMDYWGQGTLVTVSS

SEQ ID NO: 247 - protein, 124 aa, Artificial Sequence
  source: /note="Description of Artificial Sequence: Synthetic polypeptide"
  source: /note="Heavy Chain of hSC16.13 IgG histidine scanning variant #10"
QITLKESGPTLVKPTQTLTLTCTFSGFSLSTSGMHVGWIRQPPGKALEWLAHIWWDDVKRYSPSLKSRLTITKDTSKNQVVLTMTNMDPVDTATYYCARIVSFDNDVVSAMDYWGQGTLVTVSS

SEQ ID NO: 248 - protein, 124 aa, Artificial Sequence
  source: /note="Description of Artificial Sequence: Synthetic polypeptide"
  source: /note="Heavy Chain of hSC16.13 IgG histidine scanning variant #11"
QITLKESGPTLVKPTQTLTLTCTFSGFSLSTSGMGHGWIRQPPGKALEWLAHIWWDDVKRYSPSLKSRLTITKDTSKNQVVLTMTNMDPVDTATYYCARIVSFDNDVVSAMDYWGQGTLVTVSS

SEQ ID NO: 249 - protein, 124 aa, Artificial Sequence
  source: /note="Description of Artificial Sequence: Synthetic polypeptide"
  source: /note="Heavy Chain of hSC16.13 IgG histidine scanning variant #12"
QITLKESGPTLVKPTQTLTLTCTFSGFSLSTSGMGVHWIRQPPGKALEWLAHIWWDDVKRYSPSLKSRLTITKDTSKNQVVLTMTNMDPVDTATYYCARIVSFDNDVVSAMDYWGQGTLVTVSS

SEQ ID NO: 250 - protein, 124 aa, Artificial Sequence
  source: /note="Description of Artificial Sequence: Synthetic polypeptide"
  source: /note="Heavy Chain of hSC16.13 IgG histidine scanning variant #13"
QITLKESGPTLVKPTQTLTLTCTFSGFSLSTSGMGVGWIRQPPGKALEWLAAIWWDDVKRYSPSLKSRLTITKDTSKNQVVLTMTNMDPVDTATYYCARIVSFDNDVVSAMDYWGQGTLVTVSS

SEQ ID NO: 251 - protein, 124 aa, Artificial Sequence
  source: /note="Description of Artificial Sequence: Synthetic polypeptide"
  source: /note="Heavy Chain of hSC16.13 IgG histidine scanning variant #14"
QITLKESGPTLVKPTQTLTLTCTFSGFSLSTSGMGVGWIRQPPGKALEWLAHHWWDDVKRYSPSLKSRLTITKDTSKNQVVLTMTNMDPVDTATYYCARIVSFDNDVVSAMDYWGQGTLVTVSS

SEQ ID NO: 252 - protein, 124 aa, Artificial Sequence
  source: /note="Description of Artificial Sequence: Synthetic polypeptide"
  source: /note="Heavy Chain of hSC16.13 IgG histidine scanning variant #15"
QITLKESGPTLVKPTQTLTLTCTFSGFSLSTSGMGVGWIRQPPGKALEWLAHIHWDDVKRYSPSLKSRLTITKDTSKNQVVLTMTNMDPVDTATYYCARIVSFDNDVVSAMDYWGQGTLVTVSS

SEQ ID NO: 253 - protein, 124 aa, Artificial Sequence
  source: /note="Description of Artificial Sequence: Synthetic polypeptide"
  source: /note="Heavy Chain of hSC16.13 IgG histidine scanning variant #16"
QITLKESGPTLVKPTQTLTLTCTFSGFSLSTSGMGVGWIRQPPGKALEWLAHIWHDDVKRYSPSLKSRLTITKDTSKNQVVLTMTNMDPVDTATYYCARIVSFDNDVVSAMDYWGQGTLVTVSS

SEQ ID NO: 254 - protein, 124 aa, Artificial Sequence
  source: /note="Description of Artificial Sequence: Synthetic polypeptide"
  source: /note="Heavy Chain of hSC16.13 IgG histidine scanning variant #17"
QITLKESGPTLVKPTQTLTLTCTFSGFSLSTSGMGVGWIRQPPGKALEWLAHIWWHDVKRYSPSLKSRLTITKDTSKNQVVLTMTNMDPVDTATYYCARIVSFDNDVVSAMDYWGQGTLVTVSS

SEQ ID NO: 255 - protein, 124 aa, Artificial Sequence
  source: /note="Description of Artificial Sequence: Synthetic polypeptide"
  source: /note="Heavy Chain of hSC16.13 IgG histidine scanning variant #18"
QITLKESGPTLVKPTQTLTLTCTFSGFSLSTSGMGVGWIRQPPGKALEWLAHIWWDHVKRYSPSLKSRLTITKDTSKNQVVLTMTNMDPVDTATYYCARIVSFDNDVVSAMDYWGQGTLVTVSS

SEQ ID NO: 256 - protein, 124 aa, Artificial Sequence
  source: /note="Description of Artificial Sequence: Synthetic polypeptide"
  source: /note="Heavy Chain of hSC16.13 IgG histidine scanning variant #19"
QITLKESGPTLVKPTQTLTLTCTFSGFSLSTSGMGVGWIRQPPGKALEWLAHIWWDDHKRYSPSLKSRLTITKDTSKNQVVLTMTNMDPVDTATYYCARIVSFDNDVVSAMDYWGQGTLVTVSS

SEQ ID NO: 257 - protein, 124 aa, Artificial Sequence
  source: /note="Description of Artificial Sequence: Synthetic polypeptide"
  source: /note="Heavy Chain of hSC16.13 IgG histidine scanning variant #20"
QITLKESGPTLVKPTQTLTLTCTFSGFSLSTSGMGVGWIRQPPGKALEWLAHIWWDDVHRYSPSLKSRLTITKDTSKNQVVLTMTNMDPVDTATYYCARIVSFDNDVVSAMDYWGQGTLVTVSS

SEQ ID NO: 258 - protein, 124 aa, Artificial Sequence
  source: /note="Description of Artificial Sequence: Synthetic polypeptide"
  source: /note="Heavy Chain of hSC16.13 IgG histidine scanning variant #21"
QITLKESGPTLVKPTQTLTLTCTFSGFSLSTSGMGVGWIRQPPGKALEWLAHIWWDDVKHYSPSLKSRLTITKDTSKNQVVLTMTNMDPVDTATYYCARIVSFDNDVVSAMDYWGQGTLVTVSS

SEQ ID NO: 259 - protein, 124 aa, Artificial Sequence
  source: /note="Description of Artificial Sequence: Synthetic polypeptide"
  source: /note="Heavy Chain of hSC16.13 IgG histidine scanning variant #22"
QITLKESGPTLVKPTQTLTLTCTFSGFSLSTSGMGVGWIRQPPGKALEWLAHIWWDDVKRHSPSLKSRLTITKDTSKNQVVLTMTNMDPVDTATYYCARIVSFDNDVVSAMDYWGQGTLVTVSS

SEQ ID NO: 260 - protein, 124 aa, Artificial Sequence
  source: /note="Description of Artificial Sequence: Synthetic polypeptide"
  source: /note="Heavy Chain of hSC16.13 IgG histidine scanning variant #23"
QITLKESGPTLVKPTQTLTLTCTFSGFSLSTSGMGVGWIRQPPGKALEWLAHIWWDDVKRYHPSLKSRLTITKDTSKNQVVLTMTNMDPVDTATYYCARIVSFDNDVVSAMDYWGQGTLVTVSS

SEQ ID NO: 261 - protein, 124 aa, Artificial Sequence
  source: /note="Description of Artificial Sequence: Synthetic polypeptide"
  source: /note="Heavy Chain of hSC16.13 IgG histidine scanning variant #24"
QITLKESGPTLVKPTQTLTLTCTFSGFSLSTSGMGVGWIRQPPGKALEWLAHIWWDDVKRYSHSLKSRLTITKDTSKNQVVLTMTNMDPVDTATYYCARIVSFDNDVVSAMDYWGQGTLVTVSS

SEQ ID NO: 262 - protein, 124 aa, Artificial Sequence
  source: /note="Description of Artificial Sequence: Synthetic polypeptide"
  source: /note="Heavy Chain of hSC16.13 IgG histidine scanning variant #25"
QITLKESGPTLVKPTQTLTLTCTFSGFSLSTSGMGVGWIRQPPGKALEWLAHIWWDDVKRYSPHLKSRLTITKDTSKNQVVLTMTNMDPVDTATYYCARIVSFDNDVVSAMDYWGQGTLVTVSS

SEQ ID NO: 263 - protein, 124 aa, Artificial Sequence
  source: /note="Description of Artificial Sequence: Synthetic polypeptide"
  source: /note="Heavy Chain of hSC16.13 IgG histidine scanning variant #26"
QITLKESGPTLVKPTQTLTLTCTFSGFSLSTSGMGVGWIRQPPGKALEWLAHIWWDDVKRYSPSHKSRLTITKDTSKNQVVLTMTNMDPVDTATYYCARIVSFDNDVVSAMDYWGQGTLVTVSS

SEQ ID NO: 264 - protein, 124 aa, Artificial Sequence
  source: /note="Description of Artificial Sequence: Synthetic polypeptide"
  source: /note="Heavy Chain of hSC16.13 IgG histidine scanning variant #27"
QITLKESGPTLVKPTQTLTLTCTFSGFSLSTSGMGVGWIRQPPGKALEWLAHIWWDDVKRYSPSLHSRLTITKDTSKNQVVLTMTNMDPVDTATYYCARIVSFDNDVVSAMDYWGQGTLVTVSS

SEQ ID NO: 265 - protein, 124 aa, Artificial Sequence
  source: /note="Description of Artificial Sequence: Synthetic polypeptide"
  source: /note="Heavy Chain of hSC16.13 IgG histidine scanning variant #28"
QITLKESGPTLVKPTQTLTLTCTFSGFSLSTSGMGVGWIRQPPGKALEWLAHIWWDDVKRYSPSLKHRLTITKDTSKNQVVLTMTNMDPVDTATYYCARIVSFDNDVVSAMDYWGQGTLVTVSS

SEQ ID NO: 266 - protein, 124 aa, Artificial Sequence
  source: /note="Description of Artificial Sequence: Synthetic polypeptide"
  source: /note="Heavy Chain of hSC16.13 IgG histidine scanning variant #29"
QITLKESGPTLVKPTQTLTLTCTFSGFSLSTSGMGVGWIRQPPGKALEWLAHIWWDDVKRYSPSLKSRLTITKDTSKNQVVLTMTNMDPVDTATYYCHRIVSFDNDVVSAMDYWGQGTLVTVSS

SEQ ID NO: 267 - protein, 124 aa, Artificial Sequence
  source: /note="Description of Artificial Sequence: Synthetic polypeptide"
  source: /note="Heavy Chain of hSC16.13 IgG histidine scanning variant #30"
QITLKESGPTLVKPTQTLTLTCTFSGFSLSTSGMGVGWIRQPPGKALEWLAHIWWDDVKRYSPSLKSRLTITKDTSKNQVVLTMTNMDPVDTATYYCAHIVSFDNDVVSAMDYWGQGTLVTVSS

SEQ ID NO: 268 - protein, 124 aa, Artificial Sequence
  source: /note="Description of Artificial Sequence: Synthetic polypeptide"
  source: /note="Heavy Chain of hSC16.13 IgG histidine scanning variant #31"
QITLKESGPTLVKPTQTLTLTCTFSGFSLSTSGMGVGWIRQPPGKALEWLAHIWWDDVKRYSPSLKSRLTITKDTSKNQVVLTMTNMDPVDTATYYCARHVSFDNDVVSAMDYWGQGTLVTVSS

SEQ ID NO: 269 - protein, 124 aa, Artificial Sequence
  source: /note="Description of Artificial Sequence: Synthetic polypeptide"
  source: /note="Heavy Chain of hSC16.13 IgG histidine scanning variant #32"
QITLKESGPTLVKPTQTLTLTCTFSGFSLSTSGMGVGWIRQPPGKALEWLAHIWWDDVKRYSPSLKSRLTITKDTSKNQVVLTMTNMDPVDTATYYCARIHSFDNDVVSAMDYWGQGTLVTVSS

SEQ ID NO: 270 - protein, 124 aa, Artificial Sequence
  source: /note="Description of Artificial Sequence: Synthetic polypeptide"
  source: /note="Heavy Chain of hSC16.13 IgG histidine scanning variant #33"
QITLKESGPTLVKPTQTLTLTCTFSGFSLSTSGMGVGWIRQPPGKALEWLAHIWWDDVKRYSPSLKSRLTITKDTSKNQVVLTMTNMDPVDTATYYCARIVHFDNDVVSAMDYWGQGTLVTVSS

SEQ ID NO: 271 - protein, 124 aa, Artificial Sequence
  source: /note="Description of Artificial Sequence: Synthetic polypeptide"
  source: /note="Heavy Chain of hSC16.13 IgG histidine scanning variant #34"
QITLKESGPTLVKPTQTLTLTCTFSGFSLSTSGMGVGWIRQPPGKALEWLAHIWWDDVKRYSPSLKSRLTITKDTSKNQVVLTMTNMDPVDTATYYCARIVSHDNDVVSAMDYWGQGTLVTVSS

SEQ ID NO: 272 - protein, 124 aa, Artificial Sequence
  source: /note="Description of Artificial Sequence: Synthetic polypeptide"
  source: /note="Heavy Chain of hSC16.13 IgG histidine scanning variant #35"
QITLKESGPTLVKPTQTLTLTCTFSGFSLSTSGMGVGWIRQPPGKALEWLAHIWWDDVKRYSPSLKSRLTITKDTSKNQVVLTMTNMDPVDTATYYCARIVSFHNDVVSAMDYWGQGTLVTVSS

SEQ ID NO: 273 - protein, 124 aa, Artificial Sequence
  source: /note="Description of Artificial Sequence: Synthetic polypeptide"
  source: /note="Heavy Chain of hSC16.13 IgG histidine scanning variant #36"
QITLKESGPTLVKPTQTLTLTCTFSGFSLSTSGMGVGWIRQPPGKALEWLAHIWWDDVKRYSPSLKSRLTITKDTSKNQVVLTMTNMDPVDTATYYCARIVSFDHDVVSAMDYWGQGTLVTVSS

SEQ ID NO: 274 - protein, 124 aa, Artificial Sequence
  source: /note="Description of Artificial Sequence: Synthetic polypeptide"
  source: /note="Heavy Chain of hSC16.13 IgG histidine scanning variant #37"
QITLKESGPTLVKPTQTLTLTCTFSGFSLSTSGMGVGWIRQPPGKALEWLAHIWWDDVKRYSPSLKSRLTITKDTSKNQVVLTMTNMDPVDTATYYCARIVSFDNHVVSAMDYWGQGTLVTVSS

SEQ ID NO: 275 - protein, 124 aa, Artificial Sequence
  source: /note="Description of Artificial Sequence: Synthetic polypeptide"
  source: /note="Heavy Chain of hSC16.13 IgG histidine scanning variant #38"
QITLKESGPTLVKPTQTLTLTCTFSGFSLSTSGMGVGWIRQPPGKALEWLAHIWWDDVKRYSPSLKSRLTITKDTSKNQVVLTMTNMDPVDTATYYCARIVSFDNDHVSAMDYWGQGTLVTVSS

SEQ ID NO: 276 - protein, 124 aa, Artificial Sequence
  source: /note="Description of Artificial Sequence: Synthetic polypeptide"
  source: /note="Heavy Chain of hSC16.13 IgG histidine scanning variant #39"
QITLKESGPTLVKPTQTLTLTCTFSGFSLSTSGMGVGWIRQPPGKALEWLAHIWWDDVKRYSPSLKSRLTITKDTSKNQVVLTMTNMDPVDTATYYCARIVSFDNDVHSAMDYWGQGTLVTVSS

SEQ ID NO: 277 - protein, 124 aa, Artificial Sequence
  source: /note="Description of Artificial Sequence: Synthetic polypeptide"
  source: /note="Heavy Chain of hSC16.13 IgG histidine scanning variant #40"
QITLKESGPTLVKPTQTLTLTCTFSGFSLSTSGMGVGWIRQPPGKALEWLAHIWWDDVKRYSPSLKSRLTITKDTSKNQVVLTMTNMDPVDTATYYCARIVSFDNDVVHAMDYWGQGTLVTVSS

SEQ ID NO: 278 - protein, 124 aa, Artificial Sequence
  source: /note="Description of Artificial Sequence: Synthetic polypeptide"
  source: /note="Heavy Chain of hSC16.13 IgG histidine scanning variant #41"
QITLKESGPTLVKPTQTLTLTCTFSGFSLSTSGMGVGWIRQPPGKALEWLAHIWWDDVKRYSPSLKSRLTITKDTSKNQVVLTMTNMDPVDTATYYCARIVSFDNDVVSHMDYWGQGTLVTVSS

SEQ ID NO: 279 - protein, 124 aa, Artificial Sequence
  source: /note="Description of Artificial Sequence: Synthetic polypeptide"
  source: /note="Heavy Chain of hSC16.13 IgG histidine scanning variant #42"
QITLKESGPTLVKPTQTLTLTCTFSGFSLSTSGMGVGWIRQPPGKALEWLAHIWWDDVKRYSPSLKSRLTITKDTSKNQVVLTMTNMDPVDTATYYCARIVSFDNDVVSAHDYWGQGTLVTVSS

SEQ ID NO: 280 - protein, 124 aa, Artificial Sequence
  source: /note="Description of Artificial Sequence: Synthetic polypeptide"
  source: /note="Heavy Chain of hSC16.13 IgG histidine scanning variant #43"
QITLKESGPTLVKPTQTLTLTCTFSGFSLSTSGMGVGWIRQPPGKALEWLAHIWWDDVKRYSPSLKSRLTITKDTSKNQVVLTMTNMDPVDTATYYCARIVSFDNDVVSAMHYWGQGTLVTVSS

SEQ ID NO: 281 - protein, 124 aa, Artificial Sequence
  source: /note="Description of Artificial Sequence: Synthetic polypeptide"
  source: /note="Heavy Chain of hSC16.13 IgG histidine scanning variant #44"
QITLKESGPTLVKPTQTLTLTCTFSGFSLSTSGMGVGWIRQPPGKALEWLAHIWWDDVKRYSPSLKSRLTITKDTSKNQVVLTMTNMDPVDTATYYCARIVSFDNDVVSAMDHWGQGTLVTVSS

SEQ ID NO: 282 - protein, 106 aa, Artificial Sequence
  source: /note="Description of Artificial Sequence: Synthetic polypeptide"
  source: /note="Light Chain of hSC16.13 IgG histidine scanning variant #1"
DIQMTQSPSSLSASVGDRVTITCHASSSVSYMYWYQQKPGKAPKLLIYLTSNLASGVPSRFSGSGSGTDFTLTISSLQPEDFATYYCQQWRSNPFTFGQGTKLEIK

SEQ ID NO: 283 - protein, 106 aa, Artificial Sequence
  source: /note="Description of Artificial Sequence: Synthetic polypeptide"
  source: /note="Light Chain of hSC16.13 IgG histidine scanning variant #2"
DIQMTQSPSSLSASVGDRVTITCSHSSSVSYMYWYQQKPGKAPKLLIYLTSNLASGVPSRFSGSGSGTDFTLTISSLQPEDFATYYCQQWRSNPFTFGQGTKLEIK

SEQ ID NO: 284 - protein, 106 aa, Artificial Sequence
  source: /note="Description of Artificial Sequence: Synthetic polypeptide"
  source: /note="Light Chain of hSC16.13 IgG histidine scanning variant #3"
DIQMTQSPSSLSASVGDRVTITCSAHSSVSYMYWYQQKPGKAPKLLIYLTSNLASGVPSRFSGSGSGTDFTLTISSLQPEDFATYYCQQWRSNPFTFGQGTKLEIK

SEQ ID NO: 285 - protein, 106 aa, Artificial Sequence
  source: /note="Description of Artificial Sequence: Synthetic polypeptide"
  source: /note="Light Chain of hSC16.13 IgG histidine scanning variant #4"
DIQMTQSPSSLSASVGDRVTITCSASHSVSYMYWYQQKPGKAPKLLIYLTSNLASGVPSRFSGSGSGTDFTLTISSLQPEDFATYYCQQWRSNPFTFGQGTKLEIK

SEQ ID NO: 286 - protein, 106 aa, Artificial Sequence
  source: /note="Description of Artificial Sequence: Synthetic polypeptide"
  source: /note="Light Chain of hSC16.13 IgG histidine scanning variant #5"
DIQMTQSPSSLSASVGDRVTITCSASSHVSYMYWYQQKPGKAPKLLIYLTSNLASGVPSRFSGSGSGTDFTLTISSLQPEDFATYYCQQWRSNPFTFGQGTKLEIK

SEQ ID NO: 287 - protein, 106 aa, Artificial Sequence
  source: /note="Description of Artificial Sequence: Synthetic polypeptide"
  source: /note="Light Chain of hSC16.13 IgG histidine scanning variant #6"
DIQMTQSPSSLSASVGDRVTITCSASSSHSYMYWYQQKPGKAPKLLIYLTSNLASGVPSRFSGSGSGTDFTLTISSLQPEDFATYYCQQWRSNPFTFGQGTKLEIK

SEQ ID NO: 288 - protein, 106 aa, Artificial Sequence
  source: /note="Description of Artificial Sequence: Synthetic polypeptide"
  source: /note="Light Chain of hSC16.13 IgG histidine scanning variant #7"
DIQMTQSPSSLSASVGDRVTITCSASSSVHYMYWYQQKPGKAPKLLIYLTSNLASGVPSRFSGSGSGTDFTLTISSLQPEDFATYYCQQWRSNPFTFGQGTKLEIK

SEQ ID NO: 289 - protein, 106 aa, Artificial Sequence
  source: /note="Description of Artificial Sequence: Synthetic polypeptide"
  source: /note="Light Chain of hSC16.13 IgG histidine scanning variant #8"
DIQMTQSPSSLSASVGDRVTITCSASSSVSHMYWYQQKPGKAPKLLIYLTSNLASGVPSRFSGSGSGTDFTLTISSLQPEDFATYYCQQWRSNPFTFGQGTKLEIK

SEQ ID NO: 290 - protein, 106 aa, Artificial Sequence
  source: /note="Description of Artificial Sequence: Synthetic polypeptide"
  source: /note="Light Chain of hSC16.13 IgG histidine scanning variant #9"
DIQMTQSPSSLSASVGDRVTITCSASSSVSYHYWYQQKPGKAPKLLIYLTSNLASGVPSRFSGSGSGTDFTLTISSLQPEDFATYYCQQWRSNPFTFGQGTKLEIK

SEQ ID NO: 291 - protein, 106 aa, Artificial Sequence
  source: /note="Description of Artificial Sequence: Synthetic polypeptide"
  source: /note="Light Chain of hSC16.13 IgG histidine scanning variant #10"
DIQMTQSPSSLSASVGDRVTITCSASSSVSYMHWYQQKPGKAPKLLIYLTSNLASGVPSRFSGSGSGTDFTLTISSLQPEDFATYYCQQWRSNPFTFGQGTKLEIK

SEQ ID NO: 292 - protein, 106 aa, Artificial Sequence
  source: /note="Description of Artificial Sequence: Synthetic polypeptide"
  source: /note="Light Chain of hSC16.13 IgG histidine scanning variant #11"
DIQMTQSPSSLSASVGDRVTITCSASSSVSYMYWYQQKPGKAPKLLIYHTSNLASGVPSRFSGSGSGTDFTLTISSLQPEDFATYYCQQWRSNPFTFGQGTKLEIK

SEQ ID NO: 293 - protein, 106 aa, Artificial Sequence
  source: /note="Description of Artificial Sequence: Synthetic polypeptide"
  source: /note="Light Chain of hSC16.13 IgG histidine scanning variant #12"
DIQMTQSPSSLSASVGDRVTITCSASSSVSYMYWYQQKPGKAPKLLIYLHSNLASGVPSRFSGSGSGTDFTLTISSLQPEDFATYYCQQWRSNPFTFGQGTKLEIK

SEQ ID NO: 294 - protein, 106 aa, Artificial Sequence
  source: /note="Description of Artificial Sequence: Synthetic polypeptide"
  source: /note="Light Chain of hSC16.13 IgG histidine scanning variant #13"
DIQMTQSPSSLSASVGDRVTITCSASSSVSYMYWYQQKPGKAPKLLIYLTHNLASGVPSRFSGSGSGTDFTLTISSLQPEDFATYYCQQWRSNPFTFGQGTKLEIK

SEQ ID NO: 295 - protein, 106 aa, Artificial Sequence
  source: /note="Description of Artificial Sequence: Synthetic polypeptide"
  source: /note="Light Chain of hSC16.13 IgG histidine scanning variant #14"
DIQMTQSPSSLSASVGDRVTITCSASSSVSYMYWYQQKPGKAPKLLIYLTSHLASGVPSRFSGSGSGTDFTLTISSLQPEDFATYYCQQWRSNPFTFGQGTKLEIK

SEQ ID NO: 296 - protein, 106 aa, Artificial Sequence
  source: /note="Description of Artificial Sequence: Synthetic polypeptide"
  source: /note="Light Chain of hSC16.13 IgG histidine scanning variant #15"
DIQMTQSPSSLSASVGDRVTITCSASSSVSYMYWYQQKPGKAPKLLIYLTSNHASGVPSRFSGSGSGTDFTLTISSLQPEDFATYYCQQWRSNPFTFGQGTKLEIK

SEQ ID NO: 297 - protein, 106 aa, Artificial Sequence
  source: /note="Description of Artificial Sequence: Synthetic polypeptide"
  source: /note="Light Chain of hSC16.13 IgG histidine scanning variant #16"
DIQMTQSPSSLSASVGDRVTITCSASSSVSYMYWYQQKPGKAPKLLIYLTSNLHSGVPSRFSGSGSGTDFTLTISSLQPEDFATYYCQQWRSNPFTFGQGTKLEIK

SEQ ID NO: 298 - protein, 106 aa, Artificial Sequence
  source: /note="Description of Artificial Sequence: Synthetic polypeptide"
  source: /note="Light Chain of hSC16.13 IgG histidine scanning variant #17"
DIQMTQSPSSLSASVGDRVTITCSASSSVSYMYWYQQKPGKAPKLLIYLTSNLAHGVPSRFSGSGSGTDFTLTISSLQPEDFATYYCQQWRSNPFTFGQGTKLEIK

SEQ ID NO: 299 - protein, 106 aa, Artificial Sequence
  source: /note="Description of Artificial Sequence: Synthetic polypeptide"
  source: /note="Light Chain of hSC16.13 IgG histidine scanning variant #18"
DIQMTQSPSSLSASVGDRVTITCSASSSVSYMYWYQQKPGKAPKLLIYLTSNLASGVPSRFSGSGSGTDFTLTISSLQPEDFATYYCHQWRSNPFTFGQGTKLEIK

SEQ ID NO: 300 - protein, 106 aa, Artificial Sequence
  source: /note="Description of Artificial Sequence: Synthetic polypeptide"
  source: /note="Light Chain of hSC16.13 IgG histidine scanning variant #19"
DIQMTQSPSSLSASVGDRVTITCSASSSVSYMYWYQQKPGKAPKLLIYLTSNLASGVPSRFSGSGSGTDFTLTISSLQPEDFATYYCQHWRSNPFTFGQGTKLEIK

SEQ ID NO: 301 - protein, 106 aa, Artificial Sequence
  source: /note="Description of Artificial Sequence: Synthetic polypeptide"
  source: /note="Light Chain of hSC16.13 IgG histidine scanning variant #20"
DIQMTQSPSSLSASVGDRVTITCSASSSVSYMYWYQQKPGKAPKLLIYLTSNLASGVPSRFSGSGSGTDFTLTISSLQPEDFATYYCQQHRSNPFTFGQGTKLEIK

SEQ ID NO: 302 - protein, 106 aa, Artificial Sequence
  source: /note="Description of Artificial Sequence: Synthetic polypeptide"
  source: /note="Light Chain of hSC16.13 IgG histidine scanning variant #21"
DIQMTQSPSSLSASVGDRVTITCSASSSVSYMYWYQQKPGKAPKLLIYLTSNLASGVPSRFSGSGSGTDFTLTISSLQPEDFATYYCQQWHSNPFTFGQGTKLEIK

SEQ ID NO: 303 - protein, 106 aa, Artificial Sequence
  source: /note="Description of Artificial Sequence: Synthetic polypeptide"
  source: /note="Light Chain of hSC16.13 IgG histidine scanning variant #22"
DIQMTQSPSSLSASVGDRVTITCSASSSVSYMYWYQQKPGKAPKLLIYLTSNLASGVPSRFSGSGSGTDFTLTISSLQPEDFATYYCQQWRHNPFTFGQGTKLEIK

SEQ ID NO: 304 - protein, 106 aa, Artificial Sequence
  source: /note="Description of Artificial Sequence: Synthetic polypeptide"
  source: /note="Light Chain of hSC16.13 IgG histidine scanning variant #23"
DIQMTQSPSSLSASVGDRVTITCSASSSVSYMYWYQQKPGKAPKLLIYLTSNLASGVPSRFSGSGSGTDFTLTISSLQPEDFATYYCQQWRSHPFTFGQGTKLEIK

SEQ ID NO: 305 - protein, 106 aa, Artificial Sequence
  source: /note="Description of Artificial Sequence: Synthetic polypeptide"
  source: /note="Light Chain of hSC16.13 IgG histidine scanning variant #24"
DIQMTQSPSSLSASVGDRVTITCSASSSVSYMYWYQQKPGKAPKLLIYLTSNLASGVPSRFSGSGSGTDFTLTISSLQPEDFATYYCQQWRSNHFTFGQGTKLEIK

SEQ ID NO: 306 - protein, 106 aa, Artificial Sequence
  source: /note="Description of Artificial Sequence: Synthetic polypeptide"
  source: /note="Light Chain of hSC16.13 IgG histidine scanning variant #25"
DIQMTQSPSSLSASVGDRVTITCSASSSVSYMYWYQQKPGKAPKLLIYLTSNLASGVPSRFSGSGSGTDFTLTISSLQPEDFATYYCQQWRSNPHTFGQGTKLEIK

SEQ ID NO: 307 - protein, 106 aa, Artificial Sequence
  source: /note="Description of Artificial Sequence: Synthetic polypeptide"
  source: /note="Light Chain of hSC16.13 IgG histidine scanning variant #26"
DIQMTQSPSSLSASVGDRVTITCSASSSVSYMYWYQQKPGKAPKLLIYLTSNLASGVPSRFSGSGSGTDFTLTISSLQPEDFATYYCQQWRSNPFHFGQGTKLEIK

SEQ ID NO: 308 - protein, 124 aa, Artificial Sequence
  source: /note="Description of Artificial Sequence: Synthetic polypeptide"
  source: /note="Heavy Chain Combinations of hSC16.13 IgG histidine scanning variant #1"
QITLKESGPTLVKPTQTLTLTCTFSGHSLSTSGMGVGWIRQPPGKALEWLAAIWWDDVKRYSPSLKSRLTITKDTSKNQVVLTMTNMDPVDTATYYCARIVSFDNDVVSAMDYWGQGTLVTVSS

SEQ ID NO: 309 - protein, 124 aa, Artificial Sequence
  source: /note="Description of Artificial Sequence: Synthetic polypeptide"
  source: /note="Heavy Chain Combinations of hSC16.13 IgG histidine scanning variant #2"
QITLKESGPTLVKPTQTLTLTCTFSGHSLSTSGMGVGWIRQPPGKALEWLAHIWHDDVKRYSPSLKSRLTITKDTSKNQVVLTMTNMDPVDTATYYCARIVSFDNDVVSAMDYWGQGTLVTVSS

SEQ ID NO: 310 - protein, 124 aa, Artificial Sequence
  source: /note="Description of Artificial Sequence: Synthetic polypeptide"
  source: /note="Heavy Chain Combinations of hSC16.13 IgG histidine scanning variant #3"
QITLKESGPTLVKPTQTLTLTCTFSGHSLSTSGMGVGWIRQPPGKALEWLAHIWWDDVKRYSPSLKSRLTITKDTSKNQVVLTMTNMDPVDTATYYCARIVHFDNDVVSAMDYWGQGTLVTVSS

SEQ ID NO: 311 - protein, 124 aa, Artificial Sequence
  source: /note="Description of Artificial Sequence: Synthetic polypeptide"
  source: /note="Heavy Chain Combinations of hSC16.13 IgG histidine scanning variant #4"
QITLKESGPTLVKPTQTLTLTCTFSGHSLSTSGMGVGWIRQPPGKALEWLAHIWWDDVKRYSPSLKSRLTITKDTSKNQVVLTMTNMDPVDTATYYCARIVSFDNHVVSAMDYWGQGTLVTVSS

SEQ ID NO: 312 - protein, 124 aa, Artificial Sequence
  source: /note="Description of Artificial Sequence: Synthetic polypeptide"
  source: /note="Heavy Chain Combinations of hSC16.13 IgG histidine scanning variant #5"
QITLKESGPTLVKPTQTLTLTCTFSGFSLSTSGMGVGWIRQPPGKALEWLAAIWHDDVKRYSPSLKSRLTITKDTSKNQVVLTMTNMDPVDTATYYCARIVSFDNDVVSAMDYWGQGTLVTVSS

SEQ ID NO: 313 - protein, 124 aa, Artificial Sequence
  source: /note="Description of Artificial Sequence: Synthetic polypeptide"
  source: /note="Heavy Chain Combinations of hSC16.13 IgG histidine scanning variant #6"
QITLKESGPTLVKPTQTLTLTCTFSGFSLSTSGMGVGWIRQPPGKALEWLAAIWWDDVKRYSPSLKSRLTITKDTSKNQVVLTMTNMDPVDTATYYCARIVHFDNDVVSAMDYWGQGTLVTVSS

SEQ ID NO: 314 - protein, 124 aa, Artificial Sequence
  source: /note="Description of Artificial Sequence: Synthetic polypeptide"
  source: /note="Heavy Chain Combinations of hSC16.13 IgG histidine scanning variant #7"
QITLKESGPTLVKPTQTLTLTCTFSGFSLSTSGMGVGWIRQPPGKALEWLAAIWWDDVKRYSPSLKSRLTITKDTSKNQVVLTMTNMDPVDTATYYCARIVSFDNHVVSAMDYWGQGTLVTVSS

SEQ ID NO: 315 - protein, 124 aa, Artificial Sequence
  source: /note="Description of Artificial Sequence: Synthetic polypeptide"
  source: /note="Heavy Chain Combinations of hSC16.13 IgG histidine scanning variant #8"
QITLKESGPTLVKPTQTLTLTCTFSGFSLSTSGMGVGWIRQPPGKALEWLAHIWHDDVKRYSPSLKSRLTITKDTSKNQVVLTMTNMDPVDTATYYCARIVHFDNDVVSAMDYWGQGTLVTVSS

SEQ ID NO: 316 - protein, 124 aa, Artificial Sequence
  source: /note="Description of Artificial Sequence: Synthetic polypeptide"
  source: /note="Heavy Chain Combinations of hSC16.13 IgG histidine scanning variant #9"
QITLKESGPTLVKPTQTLTLTCTFSGFSLSTSGMGVGWIRQPPGKALEWLAHIWHDDVKRYSPSLKSRLTITKDTSKNQVVLTMTNMDPVDTATYYCARIVSFDNHVVSAMDYWGQGTLVTVSS

SEQ ID NO: 317 - protein, 124 aa, Artificial Sequence
  source: /note="Description of Artificial Sequence: Synthetic polypeptide"
  source: /note="Heavy Chain Combinations of hSC16.13 IgG histidine scanning variant #10"
QITLKESGPTLVKPTQTLTLTCTFSGFSLSTSGMGVGWIRQPPGKALEWLAHIWWDDVKRYSPSLKSRLTITKDTSKNQVVLTMTNMDPVDTATYYCARIVHFDNHVVSAMDYWGQGTLVTVSS

SEQ ID NO: 318 - protein, 124 aa, Artificial Sequence
  source: /note="Description of Artificial Sequence: Synthetic polypeptide"
  source: /note="Heavy Chain Combinations of hSC16.13 IgG histidine scanning variant #11"
QITLKESGPTLVKPTQTLTLTCTFSGHSLSTSGMGVGWIRQPPGKALEWLAAIWHDDVKRYSPSLKSRLTITKDTSKNQVVLTMTNMDPVDTATYYCARIVSFDNDVVSAMDYWGQGTLVTVSS

SEQ ID NO: 319 - protein, 124 aa, Artificial Sequence
  source: /note="Description of Artificial Sequence: Synthetic polypeptide"
  source: /note="Heavy Chain Combinations of hSC16.13 IgG histidine scanning variant #12"
QITLKESGPTLVKPTQTLTLTCTFSGHSLSTSGMGVGWIRQPPGKALEWLAAIWWDDVKRYSPSLKSRLTITKDTSKNQVVLTMTNMDPVDTATYYCARIVHFDNDVVSAMDYWGQGTLVTVSS

SEQ ID NO: 320 - protein, 124 aa, Artificial Sequence
  source: /note="Description of Artificial Sequence: Synthetic polypeptide"
  source: /note="Heavy Chain Combinations of hSC16.13 IgG histidine scanning variant #13"
QITLKESGPTLVKPTQTLTLTCTFSGHSLSTSGMGVGWIRQPPGKALEWLAAIWWDDVKRYSPSLKSRLTITKDTSKNQVVLTMTNMDPVDTATYYCARIVSFDNHVVSAMDYWGQGTLVTVSS

SEQ ID NO: 321 - protein, 124 aa, Artificial Sequence
  source: /note="Description of Artificial Sequence: Synthetic polypeptide"
  source: /note="Heavy Chain Combinations of hSC16.13 IgG histidine scanning variant #14"
QITLKESGPTLVKPTQTLTLTCTFSGHSLSTSGMGVGWIRQPPGKALEWLAHIWHDDVKRYSPSLKSRLTITKDTSKNQVVLTMTNMDPVDTATYYCARIVHFDNDVVSAMDYWGQGTLVTVSS

SEQ ID NO: 322 - protein, 124 aa, Artificial Sequence
  source: /note="Description of Artificial Sequence: Synthetic polypeptide"
  source: /note="Heavy Chain Combinations of hSC16.13 IgG histidine scanning variant #15"
QITLKESGPTLVKPTQTLTLTCTFSGHSLSTSGMGVGWIRQPPGKALEWLAHIWHDDVKRYSPSLKSRLTITKDTSKNQVVLTMTNMDPVDTATYYCARIVSFDNHVVSAMDYWGQGTLVTVSS

SEQ ID NO: 323 - protein, 124 aa, Artificial Sequence
  source: /note="Description of Artificial Sequence: Synthetic polypeptide"
  source: /note="Heavy Chain Combinations of hSC16.13 IgG histidine scanning variant #16"
QITLKESGPTLVKPTQTLTLTCTFSGHSLSTSGMGVGWIRQPPGKALEWLAHIWWDDVKRYSPSLKSRLTITKDTSKNQVVLTMTNMDPVDTATYYCARIVHFDNHVVSAMDYWGQGTLVTVSS

SEQ ID NO: 324 - protein, 124 aa, Artificial Sequence
  source: /note="Description of Artificial Sequence: Synthetic polypeptide"
  source: /note="Heavy Chain Combinations of hSC16.13 IgG histidine scanning variant #17"
QITLKESGPTLVKPTQTLTLTCTFSGFSLSTSGMGVGWIRQPPGKALEWLAAIWHDDVKRYSPSLKSRLTITKDTSKNQVVLTMTNMDPVDTATYYCARIVHFDNDVVSAMDYWGQGTLVTVSS

SEQ ID NO: 325 - protein, 124 aa, Artificial Sequence
  source: /note="Description of Artificial Sequence: Synthetic polypeptide"
  source: /note="Heavy Chain Combinations of hSC16.13 IgG histidine scanning variant #18"
QITLKESGPTLVKPTQTLTLTCTFSGFSLSTSGMGVGWIRQPPGKALEWLAAIWHDDVKRYSPSLKSRLTITKDTSKNQVVLTMTNMDPVDTATYYCARIVSFDNHVVSAMDYWGQGTLVTVSS

SEQ ID NO: 326 - protein, 124 aa, Artificial Sequence
  source: /note="Description of Artificial Sequence: Synthetic polypeptide"
  source: /note="Heavy Chain Combinations of hSC16.13 IgG histidine scanning variant #19"
QITLKESGPTLVKPTQTLTLTCTFSGFSLSTSGMGVGWIRQPPGKALEWLAAIWWDDVKRYSPSLKSRLTITKDTSKNQVVLTMTNMDPVDTATYYCARIVHFDNHVVSAMDYWGQGTLVTVSS

SEQ ID NO: 327 - protein, 124 aa, Artificial Sequence
  source: /note="Description of Artificial Sequence: Synthetic polypeptide"
  source: /note="Heavy Chain Combinations of hSC16.13 IgG histidine scanning variant #20"
QITLKESGPTLVKPTQTLTLTCTFSGFSLSTSGMGVGWIRQPPGKALEWLAHIWHDDVKRYSPSLKSRLTITKDTSKNQVVLTMTNMDPVDTATYYCARIVHFDNHVVSAMDYWGQGTLVTVSS

SEQ ID NO: 328 - protein, 124 aa, Artificial Sequence
  source: /note="Description of Artificial Sequence: Synthetic polypeptide"
  source: /note="Heavy Chain Combinations of hSC16.13 IgG histidine scanning variant #21"
QITLKESGPTLVKPTQTLTLTCTFSGHSLSTSGMGVGWIRQPPGKALEWLAAIWHDDVKRYSPSLKSRLTITKDTSKNQVVLTMTNMDPVDTATYYCARIVHFDNDVVSAMDYWGQGTLVTVSS

SEQ ID NO: 329 - protein, 124 aa, Artificial Sequence
  source: /note="Description of Artificial Sequence: Synthetic polypeptide"
  source: /note="Heavy Chain Combinations of hSC16.13 IgG histidine scanning variant #22"
QITLKESGPTLVKPTQTLTLTCTFSGHSLSTSGMGVGWIRQPPGKALEWLAAIWHDDVKRYSPSLKSRLTITKDTSKNQVVLTMTNMDPVDTATYYCARIVSFDNHVVSAMDYWGQGTLVTVSS

SEQ ID NO: 330 - protein, 124 aa, Artificial Sequence
  source: /note="Description of Artificial Sequence: Synthetic polypeptide"
  source: /note="Heavy Chain Combinations of hSC16.13 IgG histidine scanning variant #23"
QITLKESGPTLVKPTQTLTLTCTFSGHSLSTSGMGVGWIRQPPGKALEWLAAIWWDDVKRYSPSLKSRLTITKDTSKNQVVLTMTNMDPVDTATYYCARIVHFDNHVVSAMDYWGQGTLVTVSS

SEQ ID NO: 331 - protein, 124 aa, Artificial Sequence
  source: /note="Description of Artificial Sequence: Synthetic polypeptide"
  source: /note="Heavy Chain Combinations of hSC16.13 IgG histidine scanning variant #24"
QITLKESGPTLVKPTQTLTLTCTFSGHSLSTSGMGVGWIRQPPGKALEWLAHIWHDDVKRYSPSLKSRLTITKDTSKNQVVLTMTNMDPVDTATYYCARIVHFDNHVVSAMDYWGQGTLVTVSS

SEQ ID NO: 332 - protein, 124 aa, Artificial Sequence
  source: /note="Description of Artificial Sequence: Synthetic polypeptide"
  source: /note="Heavy Chain Combinations of hSC16.13 IgG histidine scanning variant #25"
QITLKESGPTLVKPTQTLTLTCTFSGFSLSTSGMGVGWIRQPPGKALEWLAAIWHDDVKRYSPSLKSRLTITKDTSKNQVVLTMTNMDPVDTATYYCARIVHFDNHVVSAMDYWGQGTLVTVSS

SEQ ID NO: 333 - protein, 124 aa, Artificial Sequence
  source: /note="Description of Artificial Sequence: Synthetic polypeptide"
  source: /note="Heavy Chain Combinations of hSC16.13 IgG histidine scanning variant #26"
QITLKESGPTLVKPTQTLTLTCTFSGHSLSTSGMGVGWIRQPPGKALEWLAAIWHDDVKRYSPSLKSRLTITKDTSKNQVVLTMTNMDPVDTATYYCARIVHFDNHVVSAMDYWGQGTLVTVSS

SEQ ID NO: 334 - protein, 106 aa, Artificial Sequence
  source: /note="Description of Artificial Sequence: Synthetic polypeptide"
  source: /note="Light Chain Combinations of SC16.4 IgG histidine scanning variant #1"
DIQMTQSPSSLSASVGDRVTITCSASSSVSYMHWYQQKPGKAPKLLIYHTSNLASGVPSRFSGSGSGTDFTLTISSLQPEDFATYYCQQWRSNPFTFGQGTKLEIK

SEQ ID NO: 335 - protein, 117 aa, Artificial Sequence
  source: /note="Description of Artificial Sequence: Synthetic polypeptide"
  source: /note="Heavy Chain of hSC16.15 IgG"
QVQLVQSGAEVKKPGASVKVSCKASGYTFTRYWIHWIRQAPGQGLEWMGYINPTTVYTEFNQNFKDRVTMTRDTSTSTVYMELSSLRSEDTAVYYCARGGSNFFDYWGQGTTVTVSS

SEQ ID NO: 336 - protein, 107 aa, Artificial Sequence
  source: /note="Description of Artificial Sequence: Synthetic polypeptide"
  source: /note="Light Chain of hSC16.15 IgG"
AIQLTQSPSSLSASVGDRVTITCRASENIYYNLAWYQQKPGKAPKLLIYTANSLEDGVPSRFSGSGSGTDFTLTISSLQPEDFATYFCKQAYDVPPTFGGGTKLEIK

SEQ ID NO: 337 - protein, 117 aa, Artificial Sequence
  source: /note="Description of Artificial Sequence: Synthetic polypeptide"
  source: /note="Heavy Chain of hSC16.15 IgG histidine scanning variant #1"
QVQLVQSGAEVKKPGASVKVSCHASGYTFTRYWIHWIRQAPGQGLEWMGYINPTTVYTEFNQNFKDRVTMTRDTSTSTVYMELSSLRSEDTAVYYCARGGSNFFDYWGQGTTVTVSS

SEQ ID NO: 338 - protein, 117 aa, Artificial Sequence
  source: /note="Description of Artificial Sequence: Synthetic polypeptide"
  source: /note="Heavy Chain of hSC16.15 IgG histidine scanning variant #2"
QVQLVQSGAEVKKPGASVKVSCKHSGYTFTRYWIHWIRQAPGQGLEWMGYINPTTVYTEFNQNFKDRVTMTRDTSTSTVYMELSSLRSEDTAVYYCARGGSNFFDYWGQGTTVTVSS

SEQ ID NO: 339 - protein, 117 aa, Artificial Sequence
  source: /note="Description of Artificial Sequence: Synthetic polypeptide"
  source: /note="Heavy Chain of hSC16.15 IgG histidine scanning variant #3"
QVQLVQSGAEVKKPGASVKVSCKAHGYTFTRYWIHWIRQAPGQGLEWMGYINPTTVYTEFNQNFKDRVTMTRDTSTSTVYMELSSLRSEDTAVYYCARGGSNFFDYWGQGTTVTVSS

SEQ ID NO: 340 - protein, 117 aa, Artificial Sequence
  source: /note="Description of Artificial Sequence: Synthetic polypeptide"
  source: /note="Heavy Chain of hSC16.15 IgG histidine scanning variant #4"
QVQLVQSGAEVKKPGASVKVSCKASHYTFTRYWIHWIRQAPGQGLEWMGYINPTTVYTEFNQNFKDRVTMTRDTSTSTVYMELSSLRSEDTAVYYCARGGSNFFDYWGQGTTVTVSS

SEQ ID NO: 341 - protein, 117 aa, Artificial Sequence
  source: /note="Description of Artificial Sequence: Synthetic polypeptide"
  source: /note="Heavy Chain of hSC16.15 IgG histidine scanning variant #5"
QVQLVQSGAEVKKPGASVKVSCKASGHTFTRYWIHWIRQAPGQGLEWMGYINPTTVYTEFNQNFKDRVTMTRDTSTSTVYMELSSLRSEDTAVYYCARGGSNFFDYWGQGTTVTVSS

SEQ ID NO: 342 - protein, 117 aa, Artificial Sequence
  source: /note="Description of Artificial Sequence: Synthetic polypeptide"
  source: /note="Heavy Chain of hSC16.15 IgG histidine scanning variant #6"
QVQLVQSGAEVKKPGASVKVSCKASGYHFTRYWIHWIRQAPGQGLEWMGYINPTTVYTEFNQNFKDRVTMTRDTSTSTVYMELSSLRSEDTAVYYCARGGSNFFDYWGQGTTVTVSS

SEQ ID NO: 343 - protein, 117 aa, Artificial Sequence
  source: /note="Description of Artificial Sequence: Synthetic polypeptide"
  source: /note="Heavy Chain of hSC16.15 IgG histidine scanning variant #7"
QVQLVQSGAEVKKPGASVKVSCKASGYTHTRYWIHWIRQAPGQGLEWMGYINPTTVYTEFNQNFKDRVTMTRDTSTSTVYMELSSLRSEDTAVYYCARGGSNFFDYWGQGTTVTVSS

SEQ ID NO: 344 - protein, 117 aa, Artificial Sequence
  source: /note="Description of Artificial Sequence: Synthetic polypeptide"
  source: /note="Heavy Chain of hSC16.15 IgG histidine scanning variant #8"
QVQLVQSGAEVKKPGASVKVSCKASGYTFHRYWIHWIRQAPGQGLEWMGYINPTTVYTEFNQNFKDRVTMTRDTSTSTVYMELSSLRSEDTAVYYCARGGSNFFDYWGQGTTVTVSS

SEQ ID NO: 345 - protein, 117 aa, Artificial Sequence
  source: /note="Description of Artificial Sequence: Synthetic polypeptide"
  source: /note="Heavy Chain of hSC16.15 IgG histidine scanning variant #9"
QVQLVQSGAEVKKPGASVKVSCKASGYTFTHYWIHWIRQAPGQGLEWMGYINPTTVYTEFNQNFKDRVTMTRDTSTSTVYMELSSLRSEDTAVYYCARGGSNFFDYWGQGTTVTVSS

SEQ ID NO: 346 - protein, 117 aa, Artificial Sequence
  source: /note="Description of Artificial Sequence: Synthetic polypeptide"
  source: /note="Heavy Chain of hSC16.15 IgG histidine scanning variant #10"
QVQLVQSGAEVKKPGASVKVSCKASGYTFTRHWIHWIRQAPGQGLEWMGYINPTTVYTEFNQNFKDRVTMTRDTSTSTVYMELSSLRSEDTAVYYCARGGSNFFDYWGQGTTVTVSS

SEQ ID NO: 347 - protein, 117 aa, Artificial Sequence
  source: /note="Description of Artificial Sequence: Synthetic polypeptide"
  source: /note="Heavy Chain of hSC16.15 IgG histidine scanning variant #11"
QVQLVQSGAEVKKPGASVKVSCKASGYTFTRYHIHWIRQAPGQGLEWMGYINPTTVYTEFNQNFKDRVTMTRDTSTSTVYMELSSLRSEDTAVYYCARGGSNFFDYWGQGTTVTVSS

SEQ ID NO: 348 - protein, 117 aa, Artificial Sequence
  source: /note="Description of Artificial Sequence: Synthetic polypeptide"
  source: /note="Heavy Chain of hSC16.15 IgG histidine scanning variant #12"
QVQLVQSGAEVKKPGASVKVSCKASGYTFTRYWHHWIRQAPGQGLEWMGYINPTTVYTEFNQNFKDRVTMTRDTSTSTVYMELSSLRSEDTAVYYCARGGSNFFDYWGQGTTVTVSS

SEQ ID NO: 349 - protein, 117 aa, Artificial Sequence
  source: /note="Description of Artificial Sequence: Synthetic polypeptide"
  source: /note="Heavy Chain of hSC16.15 IgG histidine scanning variant #13"
QVQLVQSGAEVKKPGASVKVSCKASGYTFTRYWIAWIRQAPGQGLEWMGYINPTTVYTEFNQNFKDRVTMTRDTSTSTVYMELSSLRSEDTAVYYCARGGSNFFDYWGQGTTVTVSS

SEQ ID NO: 350 - protein, 117 aa, Artificial Sequence
  source: /note="Description of Artificial Sequence: Synthetic polypeptide"
  source: /note="Heavy Chain of hSC16.15 IgG histidine scanning variant #14"
QVQLVQSGAEVKKPGASVKVSCKASGYTFTRYWIHWIRQAPGQGLEWMGHINPTTVYTEFNQNFKDRVTMTRDTSTSTVYMELSSLRSEDTAVYYCARGGSNFFDYWGQGTTVTVSS

SEQ ID NO: 351 - protein, 117 aa, Artificial Sequence
  source: /note="Description of Artificial Sequence: Synthetic polypeptide"
  source: /note="Heavy Chain of hSC16.15 IgG histidine scanning variant #15"
QVQLVQSGAEVKKPGASVKVSCKASGYTFTRYWIHWIRQAPGQGLEWMGYHNPTTVYTEFNQNFKDRVTMTRDTSTSTVYMELSSLRSEDTAVYYCARGGSNFFDYWGQGTTVTVSS

SEQ ID NO: 352 - protein, 117 aa, Artificial Sequence
  source: /note="Description of Artificial Sequence: Synthetic polypeptide"
  source: /note="Heavy Chain of hSC16.15 IgG histidine scanning variant #16"
QVQLVQSGAEVKKPGASVKVSCKASGYTFTRYWIHWIRQAPGQGLEWMGYIHPTTVYTEFNQNFKDRVTMTRDTSTSTVYMELSSLRSEDTAVYYCARGGSNFFDYWGQGTTVTVSS

SEQ ID NO: 353 - protein, 117 aa, Artificial Sequence
  source: /note="Description of Artificial Sequence: Synthetic polypeptide"
  source: /note="Heavy Chain of hSC16.15 IgG histidine scanning variant #17"
QVQLVQSGAEVKKPGASVKVSCKASGYTFTRYWIHWIRQAPGQGLEWMGYINHTTVYTEFNQNFKDRVTMTRDTSTSTVYMELSSLRSEDTAVYYCARGGSNFFDYWGQGTTVTVSS

SEQ ID NO: 354 - protein, 117 aa, Artificial Sequence
  source: /note="Description of Artificial Sequence: Synthetic polypeptide"
  source: /note="Heavy Chain of hSC16.15 IgG histidine scanning variant #18"
QVQLVQSGAEVKKPGASVKVSCKASGYTFTRYWIHWIRQAPGQGLEWMGYINPHTVYTEFNQNFKDRVTMTRDTSTSTVYMELSSLRSEDTAVYYCARGGSNFFDYWGQGTTVTVSS

SEQ ID NO: 355 - protein, 117 aa, Artificial Sequence
  source: /note="Description of Artificial Sequence: Synthetic polypeptide"
  source: /note="Heavy Chain of hSC16.15 IgG histidine scanning variant #19"
QVQLVQSGAEVKKPGASVKVSCKASGYTFTRYWIHWIRQAPGQGLEWMGYINPTHVYTEFNQNFKDRVTMTRDTSTSTVYMELSSLRSEDTAVYYCARGGSNFFDYWGQGTTVTVSS

SEQ ID NO: 356 - protein, 117 aa, Artificial Sequence
  source: /note="Description of Artificial Sequence: Synthetic polypeptide"
  source: /note="Heavy Chain of hSC16.15 IgG histidine scanning variant #20"
QVQLVQSGAEVKKPGASVKVSCKASGYTFTRYWIHWIRQAPGQGLEWMGYINPTTHYTEFNQNFKDRVTMTRDTSTSTVYMELSSLRSEDTAVYYCARGGSNFFDYWGQGTTVTVSS

SEQ ID NO: 357 - protein, 117 aa, Artificial Sequence
  source: /note="Description of Artificial Sequence: Synthetic polypeptide"
  source: /note="Heavy Chain of hSC16.15 IgG histidine scanning variant #21"
QVQLVQSGAEVKKPGASVKVSCKASGYTFTRYWIHWIRQAPGQGLEWMGYINPTTVHTEFNQNFKDRVTMTRDTSTSTVYMELSSLRSEDTAVYYCARGGSNFFDYWGQGTTVTVSS

SEQ ID NO: 358 - protein, 117 aa, Artificial Sequence
  source: /note="Description of Artificial Sequence: Synthetic polypeptide"
  source: /note="Heavy Chain of hSC16.15 IgG histidine scanning variant #22"
QVQLVQSGAEVKKPGASVKVSCKASGYTFTRYWIHWIRQAPGQGLEWMGYINPTTVYHEFNQNFKDRVTMTRDTSTSTVYMELSSLRSEDTAVYYCARGGSNFFDYWGQGTTVTVSS

SEQ ID NO: 359 - protein, 117 aa, Artificial Sequence
  source: /note="Description of Artificial Sequence: Synthetic polypeptide"
  source: /note="Heavy Chain of hSC16.15 IgG histidine scanning variant #23"
QVQLVQSGAEVKKPGASVKVSCKASGYTFTRYWIHWIRQAPGQGLEWMGYINPTTVYTHFNQNFKDRVTMTRDTSTSTVYMELSSLRSEDTAVYYCARGGSNFFDYWGQGTTVTVSS

SEQ ID NO: 360 - protein, 117 aa, Artificial Sequence
  source: /note="Description of Artificial Sequence: Synthetic polypeptide"
  source: /note="Heavy Chain of hSC16.15 IgG histidine scanning variant #24"
QVQLVQSGAEVKKPGASVKVSCKASGYTFTRYWIHWIRQAPGQGLEWMGYINPTTVYTEHNQNFKDRVTMTRDTSTSTVYMELSSLRSEDTAVYYCARGGSNFFDYWGQGTTVTVSS

SEQ ID NO: 361 - protein, 117 aa, Artificial Sequence
  source: /note="Description of Artificial Sequence: Synthetic polypeptide"
  source: /note="Heavy Chain of hSC16.15 IgG histidine scanning variant #25"
QVQLVQSGAEVKKPGASVKVSCKASGYTFTRYWIHWIRQAPGQGLEWMGYINPTTVYTEFHQNFKDRVTMTRDTSTSTVYMELSSLRSEDTAVYYCARGGSNFFDYWGQGTTVTVSS

SEQ ID NO: 362 - protein, 117 aa, Artificial Sequence
  source: /note="Description of Artificial Sequence: Synthetic polypeptide"
  source: /note="Heavy Chain of hSC16.15 IgG histidine scanning variant #26"
QVQLVQSGAEVKKPGASVKVSCKASGYTFTRYWIHWIRQAPGQGLEWMGYINPTTVYTEFNHNFKDRVTMTRDTSTSTVYMELSSLRSEDTAVYYCARGGSNFFDYWGQGTTVTVSS

SEQ ID NO: 363 - protein, 117 aa, Artificial Sequence
  source: /note="Description of Artificial Sequence: Synthetic polypeptide"
  source: /note="Heavy Chain of hSC16.15 IgG histidine scanning variant #27"
QVQLVQSGAEVKKPGASVKVSCKASGYTFTRYWIHWIRQAPGQGLEWMGYINPTTVYTEFNQHFKDRVTMTRDTSTSTVYMELSSLRSEDTAVYYCARGGSNFFDYWGQGTTVTVSS

SEQ ID NO: 364 - protein, 117 aa, Artificial Sequence
  source: /note="Description of Artificial Sequence: Synthetic polypeptide"
  source: /note="Heavy Chain of hSC16.15 IgG histidine scanning variant #28"
QVQLVQSGAEVKKPGASVKVSCKASGYTFTRYWIHWIRQAPGQGLEWMGYINPTTVYTEFNQNHKDRVTMTRDTSTSTVYMELSSLRSEDTAVYYCARGGSNFFDYWGQGTTVTVSS

SEQ ID NO: 365 - protein, 117 aa, Artificial Sequence
  source: /note="Description of Artificial Sequence: Synthetic polypeptide"
  source: /note="Heavy Chain of hSC16.15 IgG histidine scanning variant #29"
QVQLVQSGAEVKKPGASVKVSCKASGYTFTRYWIHWIRQAPGQGLEWMGYINPTTVYTEFNQNFHDRVTMTRDTSTSTVYMELSSLRSEDTAVYYCARGGSNFFDYWGQGTTVTVSS

SEQ ID NO: 366 - protein, 117 aa, Artificial Sequence
  source: /note="Description of Artificial Sequence: Synthetic polypeptide"
  source: /note="Heavy Chain of hSC16.15 IgG histidine scanning variant #30"
QVQLVQSGAEVKKPGASVKVSCKASGYTFTRYWIHWIRQAPGQGLEWMGYINPTTVYTEFNQNFKHRVTMTRDTSTSTVYMELSSLRSEDTAVYYCARGGSNFFDYWGQGTTVTVSS

SEQ ID NO: 367 - protein, 117 aa, Artificial Sequence
  source: /note="Description of Artificial Sequence: Synthetic polypeptide"
  source: /note="Heavy Chain of hSC16.15 IgG histidine scanning variant #31"
QVQLVQSGAEVKKPGASVKVSCKASGYTFTRYWIHWIRQAPGQGLEWMGYINPTTVYTEFNQNFKDRVTMTRDTSTSTVYMELSSLRSEDTAVYYCHRGGSNFFDYWGQGTTVTVSS

SEQ ID NO: 368 - protein, 117 aa, Artificial Sequence
  source: /note="Description of Artificial Sequence: Synthetic polypeptide"
  source: /note="Heavy Chain of hSC16.15 IgG histidine scanning variant #32"
QVQLVQSGAEVKKPGASVKVSCKASGYTFTRYWIHWIRQAPGQGLEWMGYINPTTVYTEFNQNFKDRVTMTRDTSTSTVYMELSSLRSEDTAVYYCAHGGSNFFDYWGQGTTVTVSS

SEQ ID NO: 369 - protein, 117 aa, Artificial Sequence
  source: /note="Description of Artificial Sequence: Synthetic polypeptide"
  source: /note="Heavy Chain of hSC16.15 IgG histidine scanning variant #33"
QVQLVQSGAEVKKPGASVKVSCKASGYTFTRYWIHWIRQAPGQGLEWMGYINPTTVYTEFNQNFKDRVTMTRDTSTSTVYMELSSLRSEDTAVYYCARHGSNFFDYWGQGTTVTVSS

SEQ ID NO: 370 - protein, 117 aa, Artificial Sequence
  source: /note="Description of Artificial Sequence: Synthetic polypeptide"
  source: /note="Heavy Chain of hSC16.15 IgG histidine scanning variant #34"
QVQLVQSGAEVKKPGASVKVSCKASGYTFTRYWIHWIRQAPGQGLEWMGYINPTTVYTEFNQNFKDRVTMTRDTSTSTVYMELSSLRSEDTAVYYCARGHSNFFDYWGQGTTVTVSS

SEQ ID NO: 371 - protein, 117 aa, Artificial Sequence
  source: /note="Description of Artificial Sequence: Synthetic polypeptide"
  source: /note="Heavy Chain of hSC16.15 IgG histidine scanning variant #35"
QVQLVQSGAEVKKPGASVKVSCKASGYTFTRYWIHWIRQAPGQGLEWMGYINPTTVYTEFNQNFKDRVTMTRDTSTSTVYMELSSLRSEDTAVYYCARGGHNFFDYWGQGTTVTVSS

SEQ ID NO: 372 - protein, 117 aa, Artificial Sequence
  source: /note="Description of Artificial Sequence: Synthetic polypeptide"
  source: /note="Heavy Chain of hSC16.15 IgG histidine scanning variant #36"
QVQLVQSGAEVKKPGASVKVSCKASGYTFTRYWIHWIRQAPGQGLEWMGYINPTTVYTEFNQNFKDRVTMTRDTSTSTVYMELSSLRSEDTAVYYCARGGSHFFDYWGQGTTVTVSS

SEQ ID NO: 373 - protein, 117 aa, Artificial Sequence
  source: /note="Description of Artificial Sequence: Synthetic polypeptide"
  source: /note="Heavy Chain of hSC16.15 IgG histidine scanning variant #37"
QVQLVQSGAEVKKPGASVKVSCKASGYTFTRYWIHWIRQAPGQGLEWMGYINPTTVYTEFNQNFKDRVTMTRDTSTSTVYMELSSLRSEDTAVYYCARGGSNHFDYWGQGTTVTVSS

SEQ ID NO: 374 - protein, 117 aa, Artificial Sequence
  source: /note="Description of Artificial Sequence: Synthetic polypeptide"
  source: /note="Heavy Chain of hSC16.15 IgG histidine scanning variant #38"
QVQLVQSGAEVKKPGASVKVSCKASGYTFTRYWIHWIRQAPGQGLEWMGYINPTTVYTEFNQNFKDRVTMTRDTSTSTVYMELSSLRSEDTAVYYCARGGSNFHDYWGQGTTVTVSS

SEQ ID NO: 375 - protein, 117 aa, Artificial Sequence
  source: /note="Description of Artificial Sequence: Synthetic polypeptide"
  source: /note="Heavy Chain of hSC16.15 IgG histidine scanning variant #39"
QVQLVQSGAEVKKPGASVKVSCKASGYTFTRYWIHWIRQAPGQGLEWMGYINPTTVYTEFNQNFKDRVTMTRDTSTSTVYMELSSLRSEDTAVYYCARGGSNFFHYWGQGTTVTVSS

SEQ ID NO: 376 - protein, 117 aa, Artificial Sequence
  source: /note="Description of Artificial Sequence: Synthetic polypeptide"
  source: /note="Heavy Chain of hSC16.15 IgG histidine scanning variant #40"
QVQLVQSGAEVKKPGASVKVSCKASGYTFTRYWIHWIRQAPGQGLEWMGYINPTTVYTEFNQNFKDRVTMTRDTSTSTVYMELSSLRSEDTAVYYCARGGSNFFDHWGQGTTVTVSS

SEQ ID NO: 377 - protein, 107 aa, Artificial Sequence
  source: /note="Description of Artificial Sequence: Synthetic polypeptide"
  source: /note="Light Chain of hSC16.15 IgG histidine scanning variant #1"
AIQLTQSPSSLSASVGDRVTITCRASHNIYYNLAWYQQKPGKAPKLLIYTANSLEDGVPSRFSGSGSGTDFTLTISSLQPEDFATYFCKQAYDVPPTFGGGTKLEIK

SEQ ID NO: 378 - protein, 107 aa, Artificial Sequence
  source: /note="Description of Artificial Sequence: Synthetic polypeptide"
  source: /note="Light Chain of hSC16.15 IgG histidine scanning variant #2"
AIQLTQSPSSLSASVGDRVTITCRASEHIYYNLAWYQQKPGKAPKLLIYTANSLEDGVPSRFSGSGSGTDFTLTISSLQPEDFATYFCKQAYDVPPTFGGGTKLEIK

SEQ ID NO: 379 - protein, 107 aa, Artificial Sequence
  source: /note="Description of Artificial Sequence: Synthetic polypeptide"
  source: /note="Light Chain of hSC16.15 IgG histidine scanning variant #3"
AIQLTQSPSSLSASVGDRVTITCRASENHYYNLAWYQQKPGKAPKLLIYTANSLEDGVPSRFSGSGSGTDFTLTISSLQPEDFATYFCKQAYDVPPTFGGGTKLEIK

SEQ ID NO: 380 - protein, 107 aa, Artificial Sequence
  source: /note="Description of Artificial Sequence: Synthetic polypeptide"
  source: /note="Light Chain of hSC16.15 IgG histidine scanning variant #4"
AIQLTQSPSSLSASVGDRVTITCRASENIHYNLAWYQQKPGKAPKLLIYTANSLEDGVPSRFSGSGSGTDFTLTISSLQPEDFATYFCKQAYDVPPTFGGGTKLEIK

SEQ ID NO: 381 - protein, 107 aa, Artificial Sequence
  source: /note="Description of Artificial Sequence: Synthetic polypeptide"
  source: /note="Light Chain of hSC16.15 IgG histidine scanning variant #5"
AIQLTQSPSSLSASVGDRVTITCRASENIYHNLAWYQQKPGKAPKLLIYTANSLEDGVPSRFSGSGSGTDFTLTISSLQPEDFATYFCKQAYDVPPTFGGGTKLEIK

SEQ ID NO: 382 - protein, 107 aa, Artificial Sequence
  source: /note="Description of Artificial Sequence: Synthetic polypeptide"
  source: /note="Light Chain of hSC16.15 IgG histidine scanning variant #6"
AIQLTQSPSSLSASVGDRVTITCRASENIYYHLAWYQQKPGKAPKLLIYTANSLEDGVPSRFSGSGSGTDFTLTISSLQPEDFATYFCKQAYDVPPTFGGGTKLEIK

SEQ ID NO: 383 - protein, 107 aa, Artificial Sequence
  source: /note="Description of Artificial Sequence: Synthetic polypeptide"
  source: /note="Light Chain of hSC16.15 IgG histidine scanning variant #7"
AIQLTQSPSSLSASVGDRVTITCRASENIYYNHAWYQQKPGKAPKLLIYTANSLEDGVPSRFSGSGSGTDFTLTISSLQPEDFATYFCKQAYDVPPTFGGGTKLEIK

SEQ ID NO: 384 - protein, 107 aa, Artificial Sequence
  source: /note="Description of Artificial Sequence: Synthetic polypeptide"
  source: /note="Light Chain of hSC16.15 IgG histidine scanning variant #8"
AIQLTQSPSSLSASVGDRVTITCRASENIYYNLHWYQQKPGKAPKLLIYTANSLEDGVPSRFSGSGSGTDFTLTISSLQPEDFATYFCKQAYDVPPTFGGGTKLEIK

SEQ ID NO: 385 - protein, 107 aa, Artificial Sequence
  source: /note="Description of Artificial Sequence: Synthetic polypeptide"
  source: /note="Light Chain of hSC16.15 IgG histidine scanning variant #9"
AIQLTQSPSSLSASVGDRVTITCRASENIYYNLAWYQQKPGKAPKLLIYHANSLEDGVPSRFSGSGSGTDFTLTISSLQPEDFATYFCKQAYDVPPTFGGGTKLEIK

SEQ ID NO: 386 - protein, 107 aa, Artificial Sequence
  source: /note="Description of Artificial Sequence: Synthetic polypeptide"
  source: /note="Light Chain of hSC16.15 IgG histidine scanning variant #10"
AIQLTQSPSSLSASVGDRVTITCRASENIYYNLAWYQQKPGKAPKLLIYTHNSLEDGVPSRFSGSGSGTDFTLTISSLQPEDFATYFCKQAYDVPPTFGGGTKLEIK

SEQ ID NO: 387 - protein, 107 aa, Artificial Sequence
  source: /note="Description of Artificial Sequence: Synthetic polypeptide"
  source: /note="Light Chain of hSC16.15 IgG histidine scanning variant #11"
AIQLTQSPSSLSASVGDRVTITCRASENIYYNLAWYQQKPGKAPKLLIYTAHSLEDGVPSRFSGSGSGTDFTLTISSLQPEDFATYFCKQAYDVPPTFGGGTKLEIK

SEQ ID NO: 388 - protein, 107 aa, Artificial Sequence
  source: /note="Description of Artificial Sequence: Synthetic polypeptide"
  source: /note="Light Chain of hSC16.15 IgG histidine scanning variant #12"
AIQLTQSPSSLSASVGDRVTITCRASENIYYNLAWYQQKPGKAPKLLIYTANHLEDGVPSRFSGSGSGTDFTLTISSLQPEDFATYFCKQAYDVPPTFGGGTKLEIK

SEQ ID NO: 389 - protein, 107 aa, Artificial Sequence
  source: /note="Description of Artificial Sequence: Synthetic polypeptide"
  source: /note="Light Chain of hSC16.15 IgG histidine scanning variant #13"
AIQLTQSPSSLSASVGDRVTITCRASENIYYNLAWYQQKPGKAPKLLIYTANSHEDGVPSRFSGSGSGTDFTLTISSLQPEDFATYFCKQAYDVPPTFGGGTKLEIK

SEQ ID NO: 390 - protein, 107 aa, Artificial Sequence
  source: /note="Description of Artificial Sequence: Synthetic polypeptide"
  source: /note="Light Chain of hSC16.15 IgG histidine scanning variant #14"
AIQLTQSPSSLSASVGDRVTITCRASENIYYNLAWYQQKPGKAPKLLIYTANSLHDGVPSRFSGSGSGTDFTLTISSLQPEDFATYFCKQAYDVPPTFGGGTKLEIK

SEQ ID NO: 391 - protein, 107 aa, Artificial Sequence
  source: /note="Description of Artificial Sequence: Synthetic polypeptide"
  source: /note="Light Chain of hSC16.15 IgG histidine scanning variant #15"
AIQLTQSPSSLSASVGDRVTITCRASENIYYNLAWYQQKPGKAPKLLIYTANSLEHGVPSRFSGSGSGTDFTLTISSLQPEDFATYFCKQAYDVPPTFGGGTKLEIK

SEQ ID NO: 392 - protein, 107 aa, Artificial Sequence
  source: /note="Description of Artificial Sequence: Synthetic polypeptide"
  source: /note="Light Chain of hSC16.15 IgG histidine scanning variant #16"
AIQLTQSPSSLSASVGDRVTITCRASENIYYNLAWYQQKPGKAPKLLIYTANSLEDGVPSRFSGSGSGTDFTLTISSLQPEDFATYFCHQAYDVPPTFGGGTKLEIK

SEQ ID NO: 393 - protein, 107 aa, Artificial Sequence
  source: /note="Description of Artificial Sequence: Synthetic polypeptide"
  source: /note="Light Chain of hSC16.15 IgG histidine scanning variant #17"
AIQLTQSPSSLSASVGDRVTITCRASENIYYNLAWYQQKPGKAPKLLIYTANSLEDGVPSRFSGSGSGTDFTLTISSLQPEDFATYFCKHAYDVPPTFGGGTKLEIK

SEQ ID NO: 394 - protein, 107 aa, Artificial Sequence
  source: /note="Description of Artificial Sequence: Synthetic polypeptide"
  source: /note="Light Chain of hSC16.15 IgG histidine scanning variant #18"
AIQLTQSPSSLSASVGDRVTITCRASENIYYNLAWYQQKPGKAPKLLIYTANSLEDGVPSRFSGSGSGTDFTLTISSLQPEDFATYFCKQHYDVPPTFGGGTKLEIK

SEQ ID NO: 395 - protein, 107 aa, Artificial Sequence
  source: /note="Description of Artificial Sequence: Synthetic polypeptide"
  source: /note="Light Chain of hSC16.15 IgG histidine scanning variant #19"
AIQLTQSPSSLSASVGDRVTITCRASENIYYNLAWYQQKPGKAPKLLIYTANSLEDGVPSRFSGSGSGTDFTLTISSLQPEDFATYFCKQAHDVPPTFGGGTKLEIK

SEQ ID NO: 396 - protein, 107 aa, Artificial Sequence
  source: /note="Description of Artificial Sequence: Synthetic polypeptide"
  source: /note="Light Chain of hSC16.15 IgG histidine scanning variant #20"
AIQLTQSPSSLSASVGDRVTITCRASENIYYNLAWYQQKPGKAPKLLIYTANSLEDGVPSRFSGSGSGTDFTLTISSLQPEDFATYFCKQAYHVPPTFGGGTKLEIK

SEQ ID NO: 397 - protein, 107 aa, Artificial Sequence
  source: /note="Description of Artificial Sequence: Synthetic polypeptide"
  source: /note="Light Chain of hSC16.15 IgG histidine scanning variant #21"
AIQLTQSPSSLSASVGDRVTITCRASENIYYNLAWYQQKPGKAPKLLIYTANSLEDGVPSRFSGSGSGTDFTLTISSLQPEDFATYFCKQAYDHPPTFGGGTKLEIK

SEQ ID NO: 398 - protein, 107 aa, Artificial Sequence
  source: /note="Description of Artificial Sequence: Synthetic polypeptide"
  source: /note="Light Chain of hSC16.15 IgG histidine scanning variant #22"
AIQLTQSPSSLSASVGDRVTITCRASENIYYNLAWYQQKPGKAPKLLIYTANSLEDGVPSRFSGSGSGTDFTLTISSLQPEDFATYFCKQAYDVHPTFGGGTKLEIK

SEQ ID NO: 399 - protein, 107 aa, Artificial Sequence
  source: /note="Description of Artificial Sequence: Synthetic polypeptide"
  source: /note="Light Chain of hSC16.15 IgG histidine scanning variant #23"
AIQLTQSPSSLSASVGDRVTITCRASENIYYNLAWYQQKPGKAPKLLIYTANSLEDGVPSRFSGSGSGTDFTLTISSLQPEDFATYFCKQAYDVPHTFGGGTKLEIK

SEQ ID NO: 400 - protein, 107 aa, Artificial Sequence
  source: /note="Description of Artificial Sequence: Synthetic polypeptide"
  source: /note="Light Chain of hSC16.15 IgG histidine scanning variant #24"
AIQLTQSPSSLSASVGDRVTITCRASENIYYNLAWYQQKPGKAPKLLIYTANSLEDGVPSRFSGSGSGTDFTLTISSLQPEDFATYFCKQAYDVPPHFGGGTKLEIK

SEQ ID NO: 401 - protein, 125 aa, Artificial Sequence
  source: /note="Description of Artificial Sequence: Synthetic polypeptide"
  source: /note="Heavy Chain of hSC16.25 IgG"
QITLKESGPTLVKPTQTLTLTCTFSGFSLSTSGMGVGWIRQPPGKALEWLTDIWWDDNKYYNPSLKSRLTITKDTSKNQVVLTMTNMDPVDTATYYCARRVNYYYDPYYAMDYWGQGTTLVTVSS

SEQ ID NO: 402 - protein, 106 aa, Artificial Sequence
  source: /note="Description of Artificial Sequence: Synthetic polypeptide"
  source: /note="Light Chain of hSC16.25 IgG"
EIVLTQSPDFQSVTPKEKVTITCSASSSVSYMHWYQQKPDQSPKLLIKDSSKLASGVPSRFSGSGSGTDFTLTINSLEAEDAATYYCQQWSSNPLTFGQGTKLEIK

SEQ ID NO: 403 - protein, 125 aa, Artificial Sequence
  source: /note="Description of Artificial Sequence: Synthetic polypeptide"
  source: /note="Heavy Chain of hSC16.25 IgG histidine scanning variant #1"
QITLKESGPTLVKPTQTLTLTCTFSHFSLSTSGMGVGWIRQPPGKALEWLTDIWWDDNKYYNPSLKSRLTITKDTSKNQVVLTMTNMDPVDTATYYCARRVNYYYDPYYAMDYWGQGTTLVTVSS

SEQ ID NO: 404 - protein, 125 aa, Artificial Sequence
  source: /note="Description of Artificial Sequence: Synthetic polypeptide"
  source: /note="Heavy Chain of hSC16.25 IgG histidine scanning variant #2"
QITLKESGPTLVKPTQTLTLTCTFSGHSLSTSGMGVGWIRQPPGKALEWLTDIWWDDNKYYNPSLKSRLTITKDTSKNQVVLTMTNMDPVDTATYYCARRVNYYYDPYYAMDYWGQGTTLVTVSS

SEQ ID NO: 405 - protein, 125 aa, Artificial Sequence
  source: /note="Description of Artificial Sequence: Synthetic polypeptide"
  source: /note="Heavy Chain of hSC16.25 IgG histidine scanning variant #3"
QITLKESGPTLVKPTQTLTLTCTFSGFHLSTSGMGVGWIRQPPGKALEWLTDIWWDDNKYYNPSLKSRLTITKDTSKNQVVLTMTNMDPVDTATYYCARRVNYYYDPYYAMDYWGQGTTLVTVSS

SEQ ID NO: 406 - protein, 125 aa, Artificial Sequence
  source: /note="Description of Artificial Sequence: Synthetic polypeptide"
  source: /note="Heavy Chain of hSC16.25 IgG histidine scanning variant #4"
QITLKESGPTLVKPTQTLTLTCTFSGFSHSTSGMGVGWIRQPPGKALEWLTDIWWDDNKYYNPSLKSRLTITKDTSKNQVVLTMTNMDPVDTATYYCARRVNYYYDPYYAMDYWGQGTTLVTVSS

SEQ ID NO: 407 - protein, 125 aa, Artificial Sequence
  source: /note="Description of Artificial Sequence: Synthetic polypeptide"
  source: /note="Heavy Chain of hSC16.25 IgG histidine scanning variant #5"
QITLKESGPTLVKPTQTLTLTCTFSGFSLHTSGMGVGWIRQPPGKALEWLTDIWWDDNKYYNPSLKSRLTITKDTSKNQVVLTMTNMDPVDTATYYCARRVNYYYDPYYAMDYWGQGTTLVTVSS

SEQ ID NO: 408 - protein, 125 aa, Artificial Sequence
  source: /note="Description of Artificial Sequence: Synthetic polypeptide"
  source: /note="Heavy Chain of hSC16.25 IgG histidine scanning variant #6"
QITLKESGPTLVKPTQTLTLTCTFSGFSLSHSGMGVGWIRQPPGKALEWLTDIWWDDNKYYNPSLKSRLTITKDTSKNQVVLTMTNMDPVDTATYYCARRVNYYYDPYYAMDYWGQGTTLVTVSS

SEQ ID NO: 409 - protein, 125 aa, Artificial Sequence
  source: /note="Description of Artificial Sequence: Synthetic polypeptide"
  source: /note="Heavy Chain of hSC16.25 IgG histidine scanning variant #7"
QITLKESGPTLVKPTQTLTLTCTFSGFSLSTHGMGVGWIRQPPGKALEWLTDIWWDDNKYYNPSLKSRLTITKDTSKNQVVLTMTNMDPVDTATYYCARRVNYYYDPYYAMDYWGQGTTLVTVSS

SEQ ID NO: 410 - protein, 125 aa, Artificial Sequence
  source: /note="Description of Artificial Sequence: Synthetic polypeptide"
  source: /note="Heavy Chain of hSC16.25 IgG histidine scanning variant #8"
QITLKESGPTLVKPTQTLTLTCTFSGFSLSTSHMGVGWIRQPPGKALEWLTDIWWDDNKYYNPSLKSRLTITKDTSKNQVVLTMTNMDPVDTATYYCARRVNYYYDPYYAMDYWGQGTTLVTVSS

SEQ ID NO: 411 - protein, 125 aa, Artificial Sequence
  source: /note="Description of Artificial Sequence: Synthetic polypeptide"
  source: /note="Heavy Chain of hSC16.25 IgG histidine scanning variant #9"
QITLKESGPTLVKPTQTLTLTCTFSGFSLSTSGHGVGWIRQPPGKALEWLTDIWWDDNKYYNPSLKSRLTITKDTSKNQVVLTMTNMDPVDTATYYCARRVNYYYDPYYAMDYWGQGTTLVTVSS

SEQ ID NO: 412 - protein, 125 aa, Artificial Sequence
  source: /note="Description of Artificial Sequence: Synthetic polypeptide"
  source: /note="Heavy Chain of hSC16.25 IgG histidine scanning variant #10"
QITLKESGPTLVKPTQTLTLTCTFSGFSLSTSGMHVGWIRQPPGKALEWLTDIWWDDNKYYNPSLKSRLTITKDTSKNQVVLTMTNMDPVDTATYYCARRVNYYYDPYYAMDYWGQGTTLVTVSS

SEQ ID NO: 413 - protein, 125 aa, Artificial Sequence
  source: /note="Description of Artificial Sequence: Synthetic polypeptide"
  source: /note="Heavy Chain of hSC16.25 IgG histidine scanning variant #11"
QITLKESGPTLVKPTQTLTLTCTFSGFSLSTSGMGHGWIRQPPGKALEWLTDIWWDDNKYYNPSLKSRLTITKDTSKNQVVLTMTNMDPVDTATYYCARRVNYYYDPYYAMDYWGQGTTLVTVSS

SEQ ID NO: 414 - protein, 125 aa, Artificial Sequence
  source: /note="Description of Artificial Sequence: Synthetic polypeptide"
  source: /note="Heavy Chain of hSC16.25 IgG histidine scanning variant #12"
QITLKESGPTLVKPTQTLTLTCTFSGFSLSTSGMGVHWIRQPPGKALEWLTDIWWDDNKYYNPSLKSRLTITKDTSKNQVVLTMTNMDPVDTATYYCARRVNYYYDPYYAMDYWGQGTTLVTVSS

SEQ ID NO: 415 - protein, 125 aa, Artificial Sequence
  source: /note="Description of Artificial Sequence: Synthetic polypeptide"
  source: /note="Heavy Chain of hSC16.25 IgG histidine scanning variant #13"
QITLKESGPTLVKPTQTLTLTCTFSGFSLSTSGMGVGWIRQPPGKALEWLTHIWWDDNKYYNPSLKSRLTITKDTSKNQVVLTMTNMDPVDTATYYCARRVNYYYDPYYAMDYWGQGTTLVTVSS

SEQ ID NO: 416 - protein, 125 aa, Artificial Sequence
  source: /note="Description of Artificial Sequence: Synthetic polypeptide"
  source: /note="Heavy Chain of hSC16.25 IgG histidine scanning variant #14"
QITLKESGPTLVKPTQTLTLTCTFSGFSLSTSGMGVGWIRQPPGKALEWLTDHWWDDNKYYNPSLKSRLTITKDTSKNQVVLTMTNMDPVDTATYYCARRVNYYYDPYYAMDYWGQGTTLVTVSS

SEQ ID NO: 417 - protein, 125 aa, Artificial Sequence
  source: /note="Description of Artificial Sequence: Synthetic polypeptide"
  source: /note="Heavy Chain of hSC16.25 IgG histidine scanning variant #15"
QITLKESGPTLVKPTQTLTLTCTFSGFSLSTSGMGVGWIRQPPGKALEWLTDIHWDDNKYYNPSLKSRLTITKDTSKNQVVLTMTNMDPVDTATYYCARRVNYYYDPYYAMDYWGQGTTLVTVSS

SEQ ID NO: 418 - protein, 125 aa, Artificial Sequence
  source: /note="Description of Artificial Sequence: Synthetic polypeptide"
  source: /note="Heavy Chain of hSC16.25 IgG histidine scanning variant #16"
QITLKESGPTLVKPTQTLTLTCTFSGFSLSTSGMGVGWIRQPPGKALEWLTDIWHDDNKYYNPSLKSRLTITKDTSKNQVVLTMTNMDPVDTATYYCARRVNYYYDPYYAMDYWGQGTTLVTVSS

SEQ ID NO: 419 - protein, 125 aa, Artificial Sequence
  source: /note="Description of Artificial Sequence: Synthetic polypeptide"
  source: /note="Heavy Chain of hSC16.25 IgG histidine scanning variant #17"
QITLKESGPTLVKPTQTLTLTCTFSGFSLSTSGMGVGWIRQPPGKALEWLTDIWWHDNKYYNPSLKSRLTITKDTSKNQVVLTMTNMDPVDTATYYCARRVNYYYDPYYAMDYWGQGTTLVTVSS

SEQ ID NO: 420 - protein, 125 aa, Artificial Sequence
  source: /note="Description of Artificial Sequence: Synthetic polypeptide"
  source: /note="Heavy Chain of hSC16.25 IgG histidine scanning variant #18"
QITLKESGPTLVKPTQTLTLTCTFSGFSLSTSGMGVGWIRQPPGKALEWLTDIWWDHNKYYNPSLKSRLTITKDTSKNQVVLTMTNMDPVDTATYYCARRVNYYYDPYYAMDYWGQGTTLVTVSS

SEQ ID NO: 421 - protein, 125 aa, Artificial Sequence
  source: /note="Description of Artificial Sequence: Synthetic polypeptide"
  source: /note="Heavy Chain of hSC16.25 IgG histidine scanning variant #19"
QITLKESGPTLVKPTQTLTLTCTFSGFSLSTSGMGVGWIRQPPGKALEWLTDIWWDDHKYYNPSLKSRLTITKDTSKNQVVLTMTNMDPVDTATYYCARRVNYYYDPYYAMDYWGQGTTLVTVSS

SEQ ID NO: 422 - protein, 125 aa, Artificial Sequence
  source: /note="Description of Artificial Sequence: Synthetic polypeptide"
  source: /note="Heavy Chain of hSC16.25 IgG histidine scanning variant #20"
QITLKESGPTLVKPTQTLTLTCTFSGFSLSTSGMGVGWIRQPPGKALEWLTDIWWDDNHYYNPSLKSRLTITKDTSKNQVVLTMTNMDPVDTATYYCARRVNYYYDPYYAMDYWGQGTTLVTVSS

SEQ ID NO: 423 - protein, 125 aa, Artificial Sequence
  source: /note="Description of Artificial Sequence: Synthetic polypeptide"
  source: /note="Heavy Chain of hSC16.25 IgG histidine scanning variant #21"
QITLKESGPTLVKPTQTLTLTCTFSGFSLSTSGMGVGWIRQPPGKALEWLTDIWWDDNKHYNPSLKSRLTITKDTSKNQVVLTMTNMDPVDTATYYCARRVNYYYDPYYAMDYWGQGTTLVTVSS

SEQ ID NO: 424 - protein, 125 aa, Artificial Sequence
  source: /note="Description of Artificial Sequence: Synthetic polypeptide"
  source: /note="Heavy Chain of hSC16.25 IgG histidine scanning variant #22"
QITLKESGPTLVKPTQTLTLTCTFSGFSLSTSGMGVGWIRQPPGKALEWLTDIWWDDNKYHNPSLKSRLTITKDTSKNQVVLTMTNMDPVDTATYYCARRVNYYYDPYYAMDYWGQGTTLVTVSS

SEQ ID NO: 425 - protein, 125 aa, Artificial Sequence
  source: /note="Description of Artificial Sequence: Synthetic polypeptide"
  source: /note="Heavy Chain of hSC16.25 IgG histidine scanning variant #23"
QITLKESGPTLVKPTQTLTLTCTFSGFSLSTSGMGVGWIRQPPGKALEWLTDIWWDDNKYYHPSLKSRLTITKDTSKNQVVLTMTNMDPVDTATYYCARRVNYYYDPYYAMDYWGQGTTLVTVSS

SEQ ID NO: 426 - protein, 125 aa, Artificial Sequence
  source: /note="Description of Artificial Sequence: Synthetic polypeptide"
  source: /note="Heavy Chain of hSC16.25 IgG histidine scanning variant #24"
QITLKESGPTLVKPTQTLTLTCTFSGFSLSTSGMGVGWIRQPPGKALEWLTDIWWDDNKYYNHSLKSRLTITKDTSKNQVVLTMTNMDPVDTATYYCARRVNYYYDPYYAMDYWGQGTTLVTVSS

SEQ ID NO: 427 - protein, 125 aa, Artificial Sequence
  source: /note="Description of Artificial Sequence: Synthetic polypeptide"
  source: /note="Heavy Chain of hSC16.25 IgG histidine scanning variant #25"
QITLKESGPTLVKPTQTLTLTCTFSGFSLSTSGMGVGWIRQPPGKALEWLTDIWWDDNKYYNPHLKSRLTITKDTSKNQVVLTMTNMDPVDTATYYCARRVNYYYDPYYAMDYWGQGTTLVTVSS

SEQ ID NO: 428 - protein, 125 aa, Artificial Sequence
  source: /note="Description of Artificial Sequence: Synthetic polypeptide"
  source: /note="Heavy Chain of hSC16.25 IgG histidine scanning variant #26"
QITLKESGPTLVKPTQTLTLTCTFSGFSLSTSGMGVGWIRQPPGKALEWLTDIWWDDNKYYNPSHKSRLTITKDTSKNQVVLTMTNMDPVDTATYYCARRVNYYYDPYYAMDYWGQGTTLVTVSS

SEQ ID NO: 429 - protein, 125 aa, Artificial Sequence
  source: /note="Description of Artificial Sequence: Synthetic polypeptide"
  source: /note="Heavy Chain of hSC16.25 IgG histidine scanning variant #27"
QITLKESGPTLVKPTQTLTLTCTFSGFSLSTSGMGVGWIRQPPGKALEWLTDIWWDDNKYYNPSLHSRLTITKDTSKNQVVLTMTNMDPVDTATYYCARRVNYYYDPYYAMDYWGQGTTLVTVSS

SEQ ID NO: 430 - protein, 125 aa, Artificial Sequence
  source: /note="Description of Artificial Sequence: Synthetic polypeptide"
  source: /note="Heavy Chain of hSC16.25 IgG histidine scanning variant #28"
QITLKESGPTLVKPTQTLTLTCTFSGFSLSTSGMGVGWIRQPPGKALEWLTDIWWDDNKYYNPSLKHRLTITKDTSKNQVVLTMTNMDPVDTATYYCARRVNYYYDPYYAMDYWGQGTTLVTVSS

SEQ ID NO: 431 - protein, 125 aa, Artificial Sequence
  source: /note="Description of Artificial Sequence: Synthetic polypeptide"
  source: /note="Heavy Chain of hSC16.25 IgG histidine scanning variant #29"
QITLKESGPTLVKPTQTLTLTCTFSGFSLSTSGMGVGWIRQPPGKALEWLTDIWWDDNKYYNPSLKSRLTITKDTSKNQVVLTMTNMDPVDTATYYCHRRVNYYYDPYYAMDYWGQGTTLVTVSS

SEQ ID NO: 432 - protein, 125 aa, Artificial Sequence
  source: /note="Description of Artificial Sequence: Synthetic polypeptide"
  source: /note="Heavy Chain of hSC16.25 IgG histidine scanning variant #30"
QITLKESGPTLVKPTQTLTLTCTFSGFSLSTSGMGVGWIRQPPGKALEWLTDIWWDDNKYYNPSLKSRLTITKDTSKNQVVLTMTNMDPVDTATYYCAHRVNYYYDPYYAMDYWGQGTTLVTVSS

SEQ ID NO: 433 - protein, 125 aa, Artificial Sequence
  source: /note="Description of Artificial Sequence: Synthetic polypeptide"
  source: /note="Heavy Chain of hSC16.25 IgG histidine scanning variant #31"
QITLKESGPTLVKPTQTLTLTCTFSGFSLSTSGMGVGWIRQPPGKALEWLTDIWWDDNKYYNPSLKSRLTITKDTSKNQVVLTMTNMDPVDTATYYCARHVNYYYDPYYAMDYWGQGTTLVTVSS

SEQ ID NO: 434 - protein, 125 aa, Artificial Sequence
  source: /note="Description of Artificial Sequence: Synthetic polypeptide"
  source: /note="Heavy Chain of hSC16.25 IgG histidine scanning variant #32"
QITLKESGPTLVKPTQTLTLTCTFSGFSLSTSGMGVGWIRQPPGKALEWLTDIWWDDNKYYNPSLKSRLTITKDTSKNQVVLTMTNMDPVDTATYYCARRHNYYYDPYYAMDYWGQGTTLVTVSS

SEQ ID NO: 435 - protein, 125 aa, Artificial Sequence
  source: /note="Description of Artificial Sequence: Synthetic polypeptide"
  source: /note="Heavy Chain of hSC16.25 IgG histidine scanning variant #33"
QITLKESGPTLVKPTQTLTLTCTFSGFSLSTSGMGVGWIRQPPGKALEWLTDIWWDDNKYYNPSLKSRLTITKDTSKNQVVLTMTNMDPVDTATYYCARRVHYYYDPYYAMDYWGQGTTLVTVSS

SEQ ID NO: 436 - protein, 125 aa, Artificial Sequence
  source: /note="Description of Artificial Sequence: Synthetic polypeptide"
  source: /note="Heavy Chain of hSC16.25 IgG histidine scanning variant #34"
QITLKESGPTLVKPTQTLTLTCTFSGFSLSTSGMGVGWIRQPPGKALEWLTDIWWDDNKYYNPSLKSRLTITKDTSKNQVVLTMTNMDPVDTATYYCARRVNHYYDPYYAMDYWGQGTTLVTVSS

SEQ ID NO: 437 - protein, 125 aa, Artificial Sequence
  source: /note="Description of Artificial Sequence: Synthetic polypeptide"
  source: /note="Heavy Chain of hSC16.25 IgG histidine scanning variant #35"
QITLKESGPTLVKPTQTLTLTCTFSGFSLSTSGMGVGWIRQPPGKALEWLTDIWWDDNKYYNPSLKSRLTITKDTSKNQVVLTMTNMDPVDTATYYCARRVNYHYDPYYAMDYWGQGTTLVTVSS

SEQ ID NO: 438 - protein, 125 aa, Artificial Sequence
  source: /note="Description of Artificial Sequence: Synthetic polypeptide"
  source: /note="Heavy Chain of hSC16.25 IgG histidine scanning variant #36"
QITLKESGPTLVKPTQTLTLTCTFSGFSLSTSGMGVGWIRQPPGKALEWLTDIWWDDNKYYNPSLKSRLTITKDTSKNQVVLTMTNMDPVDTATYYCARRVNYYHDPYYAMDYWGQGTTLVTVSS

SEQ ID NO: 439 - protein, 125 aa, Artificial Sequence
  source: /note="Description of Artificial Sequence: Synthetic polypeptide"
  source: /note="Heavy Chain of hSC16.25 IgG histidine scanning variant #37"
QITLKESGPTLVKPTQTLTLTCTFSGFSLSTSGMGVGWIRQPPGKALEWLTDIWWDDNKYYNPSLKSRLTITKDTSKNQVVLTMTNMDPVDTATYYCARRVNYYYHPYYAMDYWGQGTTLVTVSS

SEQ ID NO: 440 - protein, 125 aa, Artificial Sequence
  source: /note="Description of Artificial Sequence: Synthetic polypeptide"
  source: /note="Heavy Chain of hSC16.25 IgG histidine scanning variant #38"
QITLKESGPTLVKPTQTLTLTCTFSGFSLSTSGMGVGWIRQPPGKALEWLTDIWWDDNKYYNPSLKSRLTITKDTSKNQVVLTMTNMDPVDTATYYCARRVNYYYDHYYAMDYWGQGTTLVTVSS

SEQ ID NO: 441 - protein, 125 aa, Artificial Sequence
  source: /note="Description of Artificial Sequence: Synthetic polypeptide"
  source: /note="Heavy Chain of hSC16.25 IgG histidine scanning variant #39"
QITLKESGPTLVKPTQTLTLTCTFSGFSLSTSGMGVGWIRQPPGKALEWLTDIWWDDNKYYNPSLKSRLTITKDTSKNQVVLTMTNMDPVDTATYYCARRVNYYYDPHYAMDYWGQGTTLVTVSS

SEQ ID NO: 442 - protein, 125 aa, Artificial Sequence
  source: /note="Description of Artificial Sequence: Synthetic polypeptide"
  source: /note="Heavy Chain of hSC16.25 IgG histidine scanning variant #40"
QITLKESGPTLVKPTQTLTLTCTFSGFSLSTSGMGVGWIRQPPGKALEWLTDIWWDDNKYYNPSLKSRLTITKDTSKNQVVLTMTNMDPVDTATYYCARRVNYYYDPYHAMDYWGQGTTLVTVSS

SEQ ID NO: 443 - protein, 125 aa, Artificial Sequence
  source: /note="Description of Artificial Sequence: Synthetic polypeptide"
  source: /note="Heavy Chain of hSC16.25 IgG histidine scanning variant #41"
QITLKESGPTLVKPTQTLTLTCTFSGFSLSTSGMGVGWIRQPPGKALEWLTDIWWDDNKYYNPSLKSRLTITKDTSKNQVVLTMTNMDPVDTATYYCARRVNYYYDPYYHMDYWGQGTTLVTVSS

SEQ ID NO: 444 - protein, 125 aa, Artificial Sequence
  source: /note="Description of Artificial Sequence: Synthetic polypeptide"
  source: /note="Heavy Chain of hSC16.25 IgG histidine scanning variant #42"
QITLKESGPTLVKPTQTLTLTCTFSGFSLSTSGMGVGWIRQPPGKALEWLTDIWWDDNKYYNPSLKSRLTITKDTSKNQVVLTMTNMDPVDTATYYCARRVNYYYDPYYAHDYWGQGTTLVTVSS

SEQ ID NO: 445 - protein, 125 aa, Artificial Sequence
  source: /note="Description of Artificial Sequence: Synthetic polypeptide"
  source: /note="Heavy Chain of hSC16.25 IgG histidine scanning variant #43"
QITLKESGPTLVKPTQTLTLTCTFSGFSLSTSGMGVGWIRQPPGKALEWLTDIWWDDNKYYNPSLKSRLTITKDTSKNQVVLTMTNMDPVDTATYYCARRVNYYYDPYYAMHYWGQGTTLVTVSS

SEQ ID NO: 446 - protein, 125 aa, Artificial Sequence
  source: /note="Description of Artificial Sequence: Synthetic polypeptide"
  source: /note="Heavy Chain of hSC16.25 IgG histidine scanning variant #44"
QITLKESGPTLVKPTQTLTLTCTFSGFSLSTSGMGVGWIRQPPGKALEWLTDIWWDDNKYYNPSLKSRLTITKDTSKNQVVLTMTNMDPVDTATYYCARRVNYYYDPYYAMDHWGQGTTLVTVSS

SEQ ID NO: 447 - protein, 106 aa, Artificial Sequence
  source: /note="Description of Artificial Sequence: Synthetic polypeptide"
  source: /note="Light Chain of hSC16.25 IgG histidine scanning variant #1"
EIVLTQSPDFQSVTPKEKVTITCSASHSVSYMHWYQQKPDQSPKLLIKDSSKLASGVPSRFSGSGSGTDFTLTINSLEAEDAATYYCQQWSSNPLTFGQGTKLEIK

SEQ ID NO: 448 - protein, 106 aa, Artificial Sequence
  source: /note="Description of Artificial Sequence: Synthetic polypeptide"
  source: /note="Light Chain of hSC16.25 IgG histidine scanning variant #2"
EIVLTQSPDFQSVTPKEKVTITCSASSHVSYMHWYQQKPDQSPKLLIKDSSKLASGVPSRFSGSGSGTDFTLTINSLEAEDAATYYCQQWSSNPLTFGQGTKLEIK

SEQ ID NO: 449 - protein, 106 aa, Artificial Sequence
  source: /note="Description of Artificial Sequence: Synthetic polypeptide"
  source: /note="Light Chain of hSC16.25 IgG histidine scanning variant #3"
EIVLTQSPDFQSVTPKEKVTITCSASSSHSYMHWYQQKPDQSPKLLIKDSSKLASGVPSRFSGSGSGTDFTLTINSLEAEDAATYYCQQWSSNPLTFGQGTKLEIK

SEQ ID NO: 450 - protein, 106 aa, Artificial Sequence
  source: /note="Description of Artificial Sequence: Synthetic polypeptide"
  source: /note="Light Chain of hSC16.25 IgG histidine scanning variant #4"
EIVLTQSPDFQSVTPKEKVTITCSASSSVHYMHWYQQKPDQSPKLLIKDSSKLASGVPSRFSGSGSGTDFTLTINSLEAEDAATYYCQQWSSNPLTFGQGTKLEIK

SEQ ID NO: 451 - protein, 106 aa, Artificial Sequence
  source: /note="Description of Artificial Sequence: Synthetic polypeptide"
  source: /note="Light Chain of hSC16.25 IgG histidine scanning variant #5"
EIVLTQSPDFQSVTPKEKVTITCSASSSVSHMHWYQQKPDQSPKLLIKDSSKLASGVPSRFSGSGSGTDFTLTINSLEAEDAATYYCQQWSSNPLTFGQGTKLEIK

SEQ ID NO: 452 - protein, 106 aa, Artificial Sequence
  source: /note="Description of Artificial Sequence: Synthetic polypeptide"
  source: /note="Light Chain of hSC16.25 IgG histidine scanning variant #6"
EIVLTQSPDFQSVTPKEKVTITCSASSSVSYHHWYQQKPDQSPKLLIKDSSKLASGVPSRFSGSGSGTDFTLTINSLEAEDAATYYCQQWSSNPLTFGQGTKLEIK

SEQ ID NO: 453 - protein, 106 aa, Artificial Sequence
  source: /note="Description of Artificial Sequence: Synthetic polypeptide"
  source: /note="Light Chain of hSC16.25 IgG histidine scanning variant #7"
EIVLTQSPDFQSVTPKEKVTITCSASSSVSYMAWYQQKPDQSPKLLIKDSSKLASGVPSRFSGSGSGTDFTLTINSLEAEDAATYYCQQWSSNPLTFGQGTKLEIK

SEQ ID NO: 454 - protein, 106 aa, Artificial Sequence
  source: /note="Description of Artificial Sequence: Synthetic polypeptide"
  source: /note="Light Chain of hSC16.25 IgG histidine scanning variant #8"
EIVLTQSPDFQSVTPKEKVTITCSASSSVSYMHWYQQKPDQSPKLLIKHSSKLASGVPSRFSGSGSGTDFTLTINSLEAEDAATYYCQQWSSNPLTFGQGTKLEIK

SEQ ID NO: 455 - protein, 106 aa, Artificial Sequence
  source: /note="Description of Artificial Sequence: Synthetic polypeptide"
  source: /note="Light Chain of hSC16.25 IgG histidine scanning variant #9"
EIVLTQSPDFQSVTPKEKVTITCSASSSVSYMHWYQQKPDQSPKLLIKDHSKLASGVPSRFSGSGSGTDFTLTINSLEAEDAATYYCQQWSSNPLTFGQGTKLEIK

SEQ ID NO: 456 - protein, 106 aa, Artificial Sequence
  source: /note="Description of Artificial Sequence: Synthetic polypeptide"
  source: /note="Light Chain of hSC16.25 IgG histidine scanning variant #10"
EIVLTQSPDFQSVTPKEKVTITCSASSSVSYMHWYQQKPDQSPKLLIKDSHKLASGVPSRFSGSGSGTDFTLTINSLEAEDAATYYCQQWSSNPLTFGQGTKLEIK

SEQ ID NO: 457 - protein, 106 aa, Artificial Sequence
  source: /note="Description of Artificial Sequence: Synthetic polypeptide"
  source: /note="Light Chain of hSC16.25 IgG histidine scanning variant #11"
EIVLTQSPDFQSVTPKEKVTITCSASSSVSYMHWYQQKPDQSPKLLIKDSSHLASGVPSRFSGSGSGTDFTLTINSLEAEDAATYYCQQWSSNPLTFGQGTKLEIK

SEQ ID NO: 458 - protein, 106 aa, Artificial Sequence
  source: /note="Description of Artificial Sequence: Synthetic polypeptide"
  source: /note="Light Chain of hSC16.25 IgG histidine scanning variant #12"
EIVLTQSPDFQSVTPKEKVTITCSASSSVSYMHWYQQKPDQSPKLLIKDSSKHASGVPSRFSGSGSGTDFTLTINSLEAEDAATYYCQQWSSNPLTFGQGTKLEIK

SEQ ID NO: 459 - protein, 106 aa, Artificial Sequence
  source: /note="Description of Artificial Sequence: Synthetic polypeptide"
  source: /note="Light Chain of hSC16.25 IgG histidine scanning variant #13"
EIVLTQSPDFQSVTPKEKVTITCSASSSVSYMHWYQQKPDQSPKLLIKDSSKLHSGVPSRFSGSGSGTDFTLTINSLEAEDAATYYCQQWSSNPLTFGQGTKLEIK

SEQ ID NO: 460 - protein, 106 aa, Artificial Sequence
  source: /note="Description of Artificial Sequence: Synthetic polypeptide"
  source: /note="Light Chain of hSC16.25 IgG histidine scanning variant #14"
EIVLTQSPDFQSVTPKEKVTITCSASSSVSYMHWYQQKPDQSPKLLIKDSSKLAHGVPSRFSGSGSGTDFTLTINSLEAEDAATYYCQQWSSNPLTFGQGTKLEIK

SEQ ID NO: 461 - protein, 106 aa, Artificial Sequence
  source: /note="Description of Artificial Sequence: Synthetic polypeptide"
  source: /note="Light Chain of hSC16.25 IgG histidine scanning variant #15"
EIVLTQSPDFQSVTPKEKVTITCSASSSVSYMHWYQQKPDQSPKLLIKDSSKLASGVPSRFSGSGSGTDFTLTINSLEAEDAATYYCHQWSSNPLTFGQGTKLEIK

SEQ ID NO: 462 - protein, 106 aa, Artificial Sequence
  source: /note="Description of Artificial Sequence: Synthetic polypeptide"
  source: /note="Light Chain of hSC16.25 IgG histidine scanning variant #16"
EIVLTQSPDFQSVTPKEKVTITCSASSSVSYMHWYQQKPDQSPKLLIKDSSKLASGVPSRFSGSGSGTDFTLTINSLEAEDAATYYCQHWSSNPLTFGQGTKLEIK

SEQ ID NO: 463 - protein, 106 aa, Artificial Sequence
  source: /note="Description of Artificial Sequence: Synthetic polypeptide"
  source: /note="Light Chain of hSC16.25 IgG histidine scanning variant #17"
EIVLTQSPDFQSVTPKEKVTITCSASSSVSYMHWYQQKPDQSPKLLIKDSSKLASGVPSRFSGSGSGTDFTLTINSLEAEDAATYYCQQHSSNPLTFGQGTKLEIK

SEQ ID NO: 464 - protein, 106 aa, Artificial Sequence
  source: /note="Description of Artificial Sequence: Synthetic polypeptide"
  source: /note="Light Chain of hSC16.25 IgG histidine scanning variant #18"
EIVLTQSPDFQSVTPKEKVTITCSASSSVSYMHWYQQKPDQSPKLLIKDSSKLASGVPSRFSGSGSGTDFTLTINSLEAEDAATYYCQQWHSNPLTFGQGTKLEIK

SEQ ID NO: 465 - protein, 106 aa, Artificial Sequence
  source: /note="Description of Artificial Sequence: Synthetic polypeptide"
  source: /note="Light Chain of hSC16.25 IgG histidine scanning variant #19"
EIVLTQSPDFQSVTPKEKVTITCSASSSVSYMHWYQQKPDQSPKLLIKDSSKLASGVPSRFSGSGSGTDFTLTINSLEAEDAATYYCQQWSHNPLTFGQGTKLEIK

SEQ ID NO: 466 - protein, 106 aa, Artificial Sequence
  source: /note="Description of Artificial Sequence: Synthetic polypeptide"
  source: /note="Light Chain of hSC16.25 IgG histidine scanning variant #20"
EIVLTQSPDFQSVTPKEKVTITCSASSSVSYMHWYQQKPDQSPKLLIKDSSKLASGVPSRFSGSGSGTDFTLTINSLEAEDAATYYCQQWSSHPLTFGQGTKLEIK

SEQ ID NO: 467 - protein, 106 aa, Artificial Sequence
  source: /note="Description of Artificial Sequence: Synthetic polypeptide"
  source: /note="Light Chain of hSC16.25 IgG histidine scanning variant #21"
EIVLTQSPDFQSVTPKEKVTITCSASSSVSYMHWYQQKPDQSPKLLIKDSSKLASGVPSRFSGSGSGTDFTLTINSLEAEDAATYYCQQWSSNHLTFGQGTKLEIK

SEQ ID NO: 468 - protein, 106 aa, Artificial Sequence
  source: /note="Description of Artificial Sequence: Synthetic polypeptide"
  source: /note="Light Chain of hSC16.25 IgG histidine scanning variant #22"
EIVLTQSPDFQSVTPKEKVTITCSASSSVSYMHWYQQKPDQSPKLLIKDSSKLASGVPSRFSGSGSGTDFTLTINSLEAEDAATYYCQQWSSNPHTFGQGTKLEIK

SEQ ID NO: 469 - protein, 106 aa, Artificial Sequence
  source: /note="Description of Artificial Sequence: Synthetic polypeptide"
  source: /note="Light Chain of hSC16.25 IgG histidine scanning variant #23"
EIVLTQSPDFQSVTPKEKVTITCSASSSVSYMHWYQQKPDQSPKLLIKDSSKLASGVPSRFSGSGSGTDFTLTINSLEAEDAATYYCQQWSSNPLHFGQGTKLEIK

SEQ ID NO: 470 - protein, 118 aa, Artificial Sequence
  source: /note="Description of Artificial Sequence: Synthetic polypeptide"
  source: /note="Heavy Chain of hSC16.34 IgG"
QVQLVQSGAEVKKPGASVKVSCKASGYTFTNYGMNWVRQAPGQRLEWMGWINTYTGDPTYADDFKGRVTITRDTSASTAYMELSSLRSEDTAVYYCARIGGNSPSDYWGQGTTVTVSS

SEQ ID NO: 471 - protein, 107 aa, Artificial Sequence
  source: /note="Description of Artificial Sequence: Synthetic polypeptide"
  source: /note="Light Chain of hSC16.34 IgG"
DIQMTQSPSSLSASVGDRVTITCKASQSVSNDVAWYQQKPGKVPKLLIYYASNRYSGVPSRFSGSGSGTDFTLTISSLQPEDVATYFCQQDYSSPWTFGGGTKVEIK

SEQ ID NO: 472 - protein, 118 aa, Artificial Sequence
  source: /note="Description of Artificial Sequence: Synthetic polypeptide"
  source: /note="Heavy Chain of hSC16.34 IgG histidine scanning variant #1"
QVQLVQSGAEVKKPGASVKVSCHASGYTFTNYGMNWVRQAPGQRLEWMGWINTYTGDPTYADDFKGRVTITRDTSASTAYMELSSLRSEDTAVYYCARIGGNSPSDYWGQGTTVTVSS

SEQ ID NO: 473 - protein, 118 aa, Artificial Sequence
  source: /note="Description of Artificial Sequence: Synthetic polypeptide"
  source: /note="Heavy Chain of hSC16.34 IgG histidine scanning variant #2"
QVQLVQSGAEVKKPGASVKVSCKHSGYTFTNYGMNWVRQAPGQRLEWMGWINTYTGDPTYADDFKGRVTITRDTSASTAYMELSSLRSEDTAVYYCARIGGNSPSDYWGQGTTVTVSS

SEQ ID NO: 474 - protein, 118 aa, Artificial Sequence
  source: /note="Description of Artificial Sequence: Synthetic polypeptide"
  source: /note="Heavy Chain of hSC16.34 IgG histidine scanning variant #3"
QVQLVQSGAEVKKPGASVKVSCKAHGYTFTNYGMNWVRQAPGQRLEWMGWINTYTGDPTYADDFKGRVTITRDTSASTAYMELSSLRSEDTAVYYCARIGGNSPSDYWGQGTTVTVSS

SEQ ID NO: 475 - protein, 118 aa, Artificial Sequence
  source: /note="Description of Artificial Sequence: Synthetic polypeptide"
  source: /note="Heavy Chain of hSC16.34 IgG histidine scanning variant #4"
QVQLVQSGAEVKKPGASVKVSCKASHYTFTNYGMNWVRQAPGQRLEWMGWINTYTGDPTYADDFKGRVTITRDTSASTAYMELSSLRSEDTAVYYCARIGGNSPSDYWGQGTTVTVSS

SEQ ID NO: 476 - protein, 118 aa, Artificial Sequence
  source: /note="Description of Artificial Sequence: Synthetic polypeptide"
  source: /note="Heavy Chain of hSC16.34 IgG histidine scanning variant #5"
QVQLVQSGAEVKKPGASVKVSCKASGHTFTNYGMNWVRQAPGQRLEWMGWINTYTGDPTYADDFKGRVTITRDTSASTAYMELSSLRSEDTAVYYCARIGGNSPSDYWGQGTTVTVSS

SEQ ID NO: 477 - protein, 118 aa, Artificial Sequence
  source: /note="Description of Artificial Sequence: Synthetic polypeptide"
  source: /note="Heavy Chain of hSC16.34 IgG histidine scanning variant #6"
QVQLVQSGAEVKKPGASVKVSCKASGYHFTNYGMNWVRQAPGQRLEWMGWINTYTGDPTYADDFKGRVTITRDTSASTAYMELSSLRSEDTAVYYCARIGGNSPSDYWGQGTTVTVSS

SEQ ID NO: 478 - protein, 118 aa, Artificial Sequence
  source: /note="Description of Artificial Sequence: Synthetic polypeptide"
  source: /note="Heavy Chain of hSC16.34 IgG histidine scanning variant #7"
QVQLVQSGAEVKKPGASVKVSCKASGYTHTNYGMNWVRQAPGQRLEWMGWINTYTGDPTYADDFKGRVTITRDTSASTAYMELSSLRSEDTAVYYCARIGGNSPSDYWGQGTTVTVSS

SEQ ID NO: 479 - protein, 118 aa, Artificial Sequence
  source: /note="Description of Artificial Sequence: Synthetic polypeptide"
  source: /note="Heavy Chain of hSC16.34 IgG histidine scanning variant #8"
QVQLVQSGAEVKKPGASVKVSCKASGYTFHNYGMNWVRQAPGQRLEWMGWINTYTGDPTYADDFKGRVTITRDTSASTAYMELSSLRSEDTAVYYCARIGGNSPSDYWGQGTTVTVSS

SEQ ID NO: 480 - protein, 118 aa, Artificial Sequence
  source: /note="Description of Artificial Sequence: Synthetic polypeptide"
  source: /note="Heavy Chain of hSC16.34 IgG histidine scanning variant #9"
QVQLVQSGAEVKKPGASVKVSCKASGYTFTHYGMNWVRQAPGQRLEWMGWINTYTGDPTYADDFKGRVTITRDTSASTAYMELSSLRSEDTAVYYCARIGGNSPSDYWGQGTTVTVSS

SEQ ID NO: 481 - protein, 118 aa, Artificial Sequence
  source: /note="Description of Artificial Sequence: Synthetic polypeptide"
  source: /note="Heavy Chain of hSC16.34 IgG histidine scanning variant #10"
QVQLVQSGAEVKKPGASVKVSCKASGYTFTNHGMNWVRQAPGQRLEWMGWINTYTGDPTYADDFKGRVTITRDTSASTAYMELSSLRSEDTAVYYCARIGGNSPSDYWGQGTTVTVSS

SEQ ID NO: 482 - protein, 118 aa, Artificial Sequence
  source: /note="Description of Artificial Sequence: Synthetic polypeptide"
  source: /note="Heavy Chain of hSC16.34 IgG histidine scanning variant #11"
QVQLVQSGAEVKKPGASVKVSCKASGYTFTNYHMNWVRQAPGQRLEWMGWINTYTGDPTYADDFKGRVTITRDTSASTAYMELSSLRSEDTAVYYCARIGGNSPSDYWGQGTTVTVSS

SEQ ID NO: 483 - protein, 118 aa, Artificial Sequence
  source: /note="Description of Artificial Sequence: Synthetic polypeptide"
  source: /note="Heavy Chain of hSC16.34 IgG histidine scanning variant #12"
QVQLVQSGAEVKKPGASVKVSCKASGYTFTNYGHNWVRQAPGQRLEWMGWINTYTGDPTYADDFKGRVTITRDTSASTAYMELSSLRSEDTAVYYCARIGGNSPSDYWGQGTTVTVSS

SEQ ID NO: 484 - protein, 118 aa, Artificial Sequence
  source: /note="Description of Artificial Sequence: Synthetic polypeptide"
  source: /note="Heavy Chain of hSC16.34 IgG histidine scanning variant #13"
QVQLVQSGAEVKKPGASVKVSCKASGYTFTNYGMHWVRQAPGQRLEWMGWINTYTGDPTYADDFKGRVTITRDTSASTAYMELSSLRSEDTAVYYCARIGGNSPSDYWGQGTTVTVSS

SEQ ID NO: 485 - protein, 118 aa, Artificial Sequence
  source: /note="Description of Artificial Sequence: Synthetic polypeptide"
  source: /note="Heavy Chain of hSC16.34 IgG histidine scanning variant #14"
QVQLVQSGAEVKKPGASVKVSCKASGYTFTNYGMNWVRQAPGQRLEWMGHINTYTGDPTYADDFKGRVTITRDTSASTAYMELSSLRSEDTAVYYCARIGGNSPSDYWGQGTTVTVSS

SEQ ID NO: 486 - protein, 118 aa, Artificial Sequence
  source: /note="Description of Artificial Sequence: Synthetic polypeptide"
  source: /note="Heavy Chain of hSC16.34 IgG histidine scanning variant #15"
QVQLVQSGAEVKKPGASVKVSCKASGYTFTNYGMNWVRQAPGQRLEWMGWHNTYTGDPTYADDFKGRVTITRDTSASTAYMELSSLRSEDTAVYYCARIGGNSPSDYWGQGTTVTVSS

SEQ ID NO: 487 - protein, 118 aa, Artificial Sequence
  source: /note="Description of Artificial Sequence: Synthetic polypeptide"
  source: /note="Heavy Chain of hSC16.34 IgG histidine scanning variant #16"
QVQLVQSGAEVKKPGASVKVSCKASGYTFTNYGMNWVRQAPGQRLEWMGWIHTYTGDPTYADDFKGRVTITRDTSASTAYMELSSLRSEDTAVYYCARIGGNSPSDYWGQGTTVTVSS

SEQ ID NO: 488 - protein, 118 aa, Artificial Sequence
  source: /note="Description of Artificial Sequence: Synthetic polypeptide"
  source: /note="Heavy Chain of hSC16.34 IgG histidine scanning variant #17"
QVQLVQSGAEVKKPGASVKVSCKASGYTFTNYGMNWVRQAPGQRLEWMGWINHYTGDPTYADDFKGRVTITRDTSASTAYMELSSLRSEDTAVYYCARIGGNSPSDYWGQGTTVTVSS

SEQ ID NO: 489 - protein, 118 aa, Artificial Sequence
  source: /note="Description of Artificial Sequence: Synthetic polypeptide"
  source: /note="Heavy Chain of hSC16.34 IgG histidine scanning variant #18"
QVQLVQSGAEVKKPGASVKVSCKASGYTFTNYGMNWVRQAPGQRLEWMGWINTHTGDPTYADDFKGRVTITRDTSASTAYMELSSLRSEDTAVYYCARIGGNSPSDYWGQGTTVTVSS

SEQ ID NO: 490 - protein, 118 aa, Artificial Sequence
  source: /note="Description of Artificial Sequence: Synthetic polypeptide"
  source: /note="Heavy Chain of hSC16.34 IgG histidine scanning variant #19"
QVQLVQSGAEVKKPGASVKVSCKASGYTFTNYGMNWVRQAPGQRLEWMGWINTYHGDPTYADDFKGRVTITRDTSASTAYMELSSLRSEDTAVYYCARIGGNSPSDYWGQGTTVTVSS

SEQ ID NO: 491 - protein, 118 aa, Artificial Sequence
  source: /note="Description of Artificial Sequence: Synthetic polypeptide"
  source: /note="Heavy Chain of hSC16.34 IgG histidine scanning variant #20"
QVQLVQSGAEVKKPGASVKVSCKASGYTFTNYGMNWVRQAPGQRLEWMGWINTYTHDPTYADDFKGRVTITRDTSASTAYMELSSLRSEDTAVYYCARIGGNSPSDYWGQGTTVTVSS

SEQ ID NO: 492 - protein, 118 aa, Artificial Sequence
  source: /note="Description of Artificial Sequence: Synthetic polypeptide"
  source: /note="Heavy Chain of hSC16.34 IgG histidine scanning variant #21"
QVQLVQSGAEVKKPGASVKVSCKASGYTFTNYGMNWVRQAPGQRLEWMGWINTYTGHPTYADDFKGRVTITRDTSASTAYMELSSLRSEDTAVYYCARIGGNSPSDYWGQGTTVTVSS

SEQ ID NO: 493 - protein, 118 aa, Artificial Sequence
  source: /note="Description of Artificial Sequence: Synthetic polypeptide"
  source: /note="Heavy Chain of hSC16.34 IgG histidine scanning variant #22"
QVQLVQSGAEVKKPGASVKVSCKASGYTFTNYGMNWVRQAPGQRLEWMGWINTYTGDHTYADDFKGRVTITRDTSASTAYMELSSLRSEDTAVYYCARIGGNSPSDYWGQGTTVTVSS

SEQ ID NO: 494 - protein, 118 aa, Artificial Sequence
  source: /note="Description of Artificial Sequence: Synthetic polypeptide"
  source: /note="Heavy Chain of hSC16.34 IgG histidine scanning variant #23"
QVQLVQSGAEVKKPGASVKVSCKASGYTFTNYGMNWVRQAPGQRLEWMGWINTYTGDPHYADDFKGRVTITRDTSASTAYMELSSLRSEDTAVYYCARIGGNSPSDYWGQGTTVTVSS

SEQ ID NO: 495 - protein, 118 aa, Artificial Sequence
  source: /note="Description of Artificial Sequence: Synthetic polypeptide"
  source: /note="Heavy Chain of hSC16.34 IgG histidine scanning variant #24"
QVQLVQSGAEVKKPGASVKVSCKASGYTFTNYGMNWVRQAPGQRLEWMGWINTYTGDPTHADDFKGRVTITRDTSASTAYMELSSLRSEDTAVYYCARIGGNSPSDYWGQGTTVTVSS

SEQ ID NO: 496 - protein, 118 aa, Artificial Sequence
  source: /note="Description of Artificial Sequence: Synthetic polypeptide"
  source: /note="Heavy Chain of hSC16.34 IgG histidine scanning variant #25"
QVQLVQSGAEVKKPGASVKVSCKASGYTFTNYGMNWVRQAPGQRLEWMGWINTYTGDPTYHDDFKGRVTITRDTSASTAYMELSSLRSEDTAVYYCARIGGNSPSDYWGQGTTVTVSS

SEQ ID NO: 497 - protein, 118 aa, Artificial Sequence
  source: /note="Description of Artificial Sequence: Synthetic polypeptide"
  source: /note="Heavy Chain of hSC16.34 IgG histidine scanning variant #26"
QVQLVQSGAEVKKPGASVKVSCKASGYTFTNYGMNWVRQAPGQRLEWMGWINTYTGDPTYAHDFKGRVTITRDTSASTAYMELSSLRSEDTAVYYCARIGGNSPSDYWGQGTTVTVSS

SEQ ID NO: 498 - protein, 118 aa, Artificial Sequence
  source: /note="Description of Artificial Sequence: Synthetic polypeptide"
  source: /note="Heavy Chain of hSC16.34 IgG histidine scanning variant #27"
QVQLVQSGAEVKKPGASVKVSCKASGYTFTNYGMNWVRQAPGQRLEWMGWINTYTGDPTYADHFKGRVTITRDTSASTAYMELSSLRSEDTAVYYCARIGGNSPSDYWGQGTTVTVSS

SEQ ID NO: 499 - protein, 118 aa, Artificial Sequence
  source: /note="Description of Artificial Sequence: Synthetic polypeptide"
  source: /note="Heavy Chain of hSC16.34 IgG histidine scanning variant #28"
QVQLVQSGAEVKKPGASVKVSCKASGYTFTNYGMNWVRQAPGQRLEWMGWINTYTGDPTYADDHKGRVTITRDTSASTAYMELSSLRSEDTAVYYCARIGGNSPSDYWGQGTTVTVSS

SEQ ID NO: 500 - protein, 118 aa, Artificial Sequence
  source: /note="Description of Artificial Sequence: Synthetic polypeptide"
  source: /note="Heavy Chain of hSC16.34 IgG histidine scanning variant #29"
QVQLVQSGAEVKKPGASVKVSCKASGYTFTNYGMNWVRQAPGQRLEWMGWINTYTGDPTYADDFHGRVTITRDTSASTAYMELSSLRSEDTAVYYCARIGGNSPSDYWGQGTTVTVSS

SEQ ID NO: 501 - protein, 118 aa, Artificial Sequence
  source: /note="Description of Artificial Sequence: Synthetic polypeptide"
  source: /note="Heavy Chain of hSC16.34 IgG histidine scanning variant #30"
QVQLVQSGAEVKKPGASVKVSCKASGYTFTNYGMNWVRQAPGQRLEWMGWINTYTGDPTYADDFKHRVTITRDTSASTAYMELSSLRSEDTAVYYCARIGGNSPSDYWGQGTTVTVSS

SEQ ID NO: 502 - protein, 118 aa, Artificial Sequence
  source: /note="Description of Artificial Sequence: Synthetic polypeptide"
  source: /note="Heavy Chain of hSC16.34 IgG histidine scanning variant #31"
QVQLVQSGAEVKKPGASVKVSCKASGYTFTNYGMNWVRQAPGQRLEWMGWINTYTGDPTYADDFKGRVTITRDTSASTAYMELSSLRSEDTAVYYCHRIGGNSPSDYWGQGTTVTVSS

SEQ ID NO: 503 - protein, 118 aa, Artificial Sequence
  source: /note="Description of Artificial Sequence: Synthetic polypeptide"
  source: /note="Heavy Chain of hSC16.34 IgG histidine scanning variant #32"
QVQLVQSGAEVKKPGASVKVSCKASGYTFTNYGMNWVRQAPGQRLEWMGWINTYTGDPTYADDFKGRVTITRDTSASTAYMELSSLRSEDTAVYYCAHIGGNSPSDYWGQGTTVTVSS

SEQ ID NO: 504 - protein, 118 aa, Artificial Sequence
  source: /note="Description of Artificial Sequence: Synthetic polypeptide"
  source: /note="Heavy Chain of hSC16.34 IgG histidine scanning variant #33"
QVQLVQSGAEVKKPGASVKVSCKASGYTFTNYGMNWVRQAPGQRLEWMGWINTYTGDPTYADDFKGRVTITRDTSASTAYMELSSLRSEDTAVYYCARHGGNSPSDYWGQGTTVTVSS

SEQ ID NO: 505 - protein, 118 aa, Artificial Sequence
  source: /note="Description of Artificial Sequence: Synthetic polypeptide"
  source: /note="Heavy Chain of hSC16.34 IgG histidine scanning variant #34"
QVQLVQSGAEVKKPGASVKVSCKASGYTFTNYGMNWVRQAPGQRLEWMGWINTYTGDPTYADDFKGRVTITRDTSASTAYMELSSLRSEDTAVYYCARIHGNSPSDYWGQGTTVTVSS

SEQ ID NO: 506 - protein, 118 aa, Artificial Sequence
  source: /note="Description of Artificial Sequence: Synthetic polypeptide"
  source: /note="Heavy Chain of hSC16.34 IgG histidine scanning variant #35"
QVQLVQSGAEVKKPGASVKVSCKASGYTFTNYGMNWVRQAPGQRLEWMGWINTYTGDPTYADDFKGRVTITRDTSASTAYMELSSLRSEDTAVYYCARIGHNSPSDYWGQGTTVTVSS

SEQ ID NO: 507 - protein, 118 aa, Artificial Sequence
  source: /note="Description of Artificial Sequence: Synthetic polypeptide"
  source: /note="Heavy Chain of hSC16.34 IgG histidine scanning variant #36"
QVQLVQSGAEVKKPGASVKVSCKASGYTFTNYGMNWVRQAPGQRLEWMGWINTYTGDPTYADDFKGRVTITRDTSASTAYMELSSLRSEDTAVYYCARIGGHSPSDYWGQGTTVTVSS

SEQ ID NO: 508 - protein, 118 aa, Artificial Sequence
  source: /note="Description of Artificial Sequence: Synthetic polypeptide"
  source: /note="Heavy Chain of hSC16.34 IgG histidine scanning variant #37"
QVQLVQSGAEVKKPGASVKVSCKASGYTFTNYGMNWVRQAPGQRLEWMGWINTYTGDPTYADDFKGRVTITRDTSASTAYMELSSLRSEDTAVYYCARIGGNHPSDYWGQGTTVTVSS

SEQ ID NO: 509 - protein, 118 aa, Artificial Sequence
  source: /note="Description of Artificial Sequence: Synthetic polypeptide"
  source: /note="Heavy Chain of hSC16.34 IgG histidine scanning variant #38"
QVQLVQSGAEVKKPGASVKVSCKASGYTFTNYGMNWVRQAPGQRLEWMGWINTYTGDPTYADDFKGRVTITRDTSASTAYMELSSLRSEDTAVYYCARIGGNSHSDYWGQGTTVTVSS

SEQ ID NO: 510 - protein, 118 aa, Artificial Sequence
  source: /note="Description of Artificial Sequence: Synthetic polypeptide"
  source: /note="Heavy Chain of hSC16.34 IgG histidine scanning variant #39"
QVQLVQSGAEVKKPGASVKVSCKASGYTFTNYGMNWVRQAPGQRLEWMGWINTYTGDPTYADDFKGRVTITRDTSASTAYMELSSLRSEDTAVYYCARIGGNSPHDYWGQGTTVTVSS

SEQ ID NO: 511 - protein, 118 aa, Artificial Sequence
  source: /note="Description of Artificial Sequence: Synthetic polypeptide"
  source: /note="Heavy Chain of hSC16.34 IgG histidine scanning variant #40"
QVQLVQSGAEVKKPGASVKVSCKASGYTFTNYGMNWVRQAPGQRLEWMGWINTYTGDPTYADDFKGRVTITRDTSASTAYMELSSLRSEDTAVYYCARIGGNSPSHYWGQGTTVTVSS

SEQ ID NO: 512 - protein, 118 aa, Artificial Sequence
  source: /note="Description of Artificial Sequence: Synthetic polypeptide"
  source: /note="Heavy Chain of hSC16.34 IgG histidine scanning variant #41"
QVQLVQSGAEVKKPGASVKVSCKASGYTFTNYGMNWVRQAPGQRLEWMGWINTYTGDPTYADDFKGRVTITRDTSASTAYMELSSLRSEDTAVYYCARIGGNSPSDHWGQGTTVTVSS

SEQ ID NO: 513 - protein, 107 aa, Artificial Sequence
  source: /note="Description of Artificial Sequence: Synthetic polypeptide"
  source: /note="Light Chain of hSC16.34 IgG histidine scanning variant #1"
DIQMTQSPSSLSASVGDRVTITCKASHSVSNDVAWYQQKPGKVPKLLIYYASNRYSGVPSRFSGSGSGTDFTLTISSLQPEDVATYFCQQDYSSPWTFGGGTKVEIK

SEQ ID NO: 514 - protein, 107 aa, Artificial Sequence
  source: /note="Description of Artificial Sequence: Synthetic polypeptide"
  source: /note="Light Chain of hSC16.34 IgG histidine scanning variant #2"
DIQMTQSPSSLSASVGDRVTITCKASQHVSNDVAWYQQKPGKVPKLLIYYASNRYSGVPSRFSGSGSGTDFTLTISSLQPEDVATYFCQQDYSSPWTFGGGTKVEIK

SEQ ID NO: 515 - protein, 107 aa, Artificial Sequence
  source: /note="Description of Artificial Sequence: Synthetic polypeptide"
  source: /note="Light Chain of hSC16.34 IgG histidine scanning variant #3"
DIQMTQSPSSLSASVGDRVTITCKASQSHSNDVAWYQQKPGKVPKLLIYYASNRYSGVPSRFSGSGSGTDFTLTISSLQPEDVATYFCQQDYSSPWTFGGGTKVEIK

SEQ ID NO: 516 - protein, 107 aa, Artificial Sequence
  source: /note="Description of Artificial Sequence: Synthetic polypeptide"
  source: /note="Light Chain of hSC16.34 IgG histidine scanning variant #4"
DIQMTQSPSSLSASVGDRVTITCKASQSVHNDVAWYQQKPGKVPKLLIYYASNRYSGVPSRFSGSGSGTDFTLTISSLQPEDVATYFCQQDYSSPWTFGGGTKVEIK

SEQ ID NO: 517 - protein, 107 aa, Artificial Sequence
  source: /note="Description of Artificial Sequence: Synthetic polypeptide"
  source: /note="Light Chain of hSC16.34 IgG histidine scanning variant #5"
DIQMTQSPSSLSASVGDRVTITCKASQSVSHDVAWYQQKPGKVPKLLIYYASNRYSGVPSRFSGSGSGTDFTLTISSLQPEDVATYFCQQDYSSPWTFGGGTKVEIK

SEQ ID NO: 518 - protein, 107 aa, Artificial Sequence
  source: /note="Description of Artificial Sequence: Synthetic polypeptide"
  source: /note="Light Chain of hSC16.34 IgG histidine scanning variant #6"
DIQMTQSPSSLSASVGDRVTITCKASQSVSNHVAWYQQKPGKVPKLLIYYASNRYSGVPSRFSGSGSGTDFTLTISSLQPEDVATYFCQQDYSSPWTFGGGTKVEIK

SEQ ID NO: 519 - protein, 107 aa, Artificial Sequence
  source: /note="Description of Artificial Sequence: Synthetic polypeptide"
  source: /note="Light Chain of hSC16.34 IgG histidine scanning variant #7"
DIQMTQSPSSLSASVGDRVTITCKASQSVSNDHAWYQQKPGKVPKLLIYYASNRYSGVPSRFSGSGSGTDFTLTISSLQPEDVATYFCQQDYSSPWTFGGGTKVEIK

SEQ ID NO: 520 - protein, 107 aa, Artificial Sequence
  source: /note="Description of Artificial Sequence: Synthetic polypeptide"
  source: /note="Light Chain of hSC16.34 IgG histidine scanning variant #8"
DIQMTQSPSSLSASVGDRVTITCKASQSVSNDVHWYQQKPGKVPKLLIYYASNRYSGVPSRFSGSGSGTDFTLTISSLQPEDVATYFCQQDYSSPWTFGGGTKVEIK

SEQ ID NO: 521 - protein, 107 aa, Artificial Sequence
  source: /note="Description of Artificial Sequence: Synthetic polypeptide"
  source: /note="Light Chain of hSC16.34 IgG histidine scanning variant #9"
DIQMTQSPSSLSASVGDRVTITCKASQSVSNDVAWYQQKPGKVPKLLIYHASNRYSGVPSRFSGSGSGTDFTLTISSLQPEDVATYFCQQDYSSPWTFGGGTKVEIK

SEQ ID NO: 522 - protein, 107 aa, Artificial Sequence
  source: /note="Description of Artificial Sequence: Synthetic polypeptide"
  source: /note="Light Chain of hSC16.34 IgG histidine scanning variant #10"
DIQMTQSPSSLSASVGDRVTITCKASQSVSNDVAWYQQKPGKVPKLLIYYHSNRYSGVPSRFSGSGSGTDFTLTISSLQPEDVATYFCQQDYSSPWTFGGGTKVEIK

SEQ ID NO: 523 - protein, 107 aa, Artificial Sequence
  source: /note="Description of Artificial Sequence: Synthetic polypeptide"
  source: /note="Light Chain of hSC16.34 IgG histidine scanning variant #11"
DIQMTQSPSSLSASVGDRVTITCKASQSVSNDVAWYQQKPGKVPKLLIYYAHNRYSGVPSRFSGSGSGTDFTLTISSLQPEDVATYFCQQDYSSPWTFGGGTKVEIK

SEQ ID NO: 524 - protein, 107 aa, Artificial Sequence
  source: /note="Description of Artificial Sequence: Synthetic polypeptide"
  source: /note="Light Chain of hSC16.34 IgG histidine scanning variant #12"
DIQMTQSPSSLSASVGDRVTITCKASQSVSNDVAWYQQKPGKVPKLLIYYASHRYSGVPSRFSGSGSGTDFTLTISSLQPEDVATYFCQQDYSSPWTFGGGTKVEIK

SEQ ID NO: 525 - protein, 107 aa, Artificial Sequence
  source: /note="Description of Artificial Sequence: Synthetic polypeptide"
  source: /note="Light Chain of hSC16.34 IgG histidine scanning variant #13"
DIQMTQSPSSLSASVGDRVTITCKASQSVSNDVAWYQQKPGKVPKLLIYYASNHYSGVPSRFSGSGSGTDFTLTISSLQPEDVATYFCQQDYSSPWTFGGGTKVEIK

SEQ ID NO: 526 - protein, 107 aa, Artificial Sequence
  source: /note="Description of Artificial Sequence: Synthetic polypeptide"
  source: /note="Light Chain of hSC16.34 IgG histidine scanning variant #14"
DIQMTQSPSSLSASVGDRVTITCKASQSVSNDVAWYQQKPGKVPKLLIYYASNRHSGVPSRFSGSGSGTDFTLTISSLQPEDVATYFCQQDYSSPWTFGGGTKVEIK

SEQ ID NO: 527 - protein, 107 aa, Artificial Sequence
  source: /note="Description of Artificial Sequence: Synthetic polypeptide"
  source: /note="Light Chain of hSC16.34 IgG histidine scanning variant #15"
DIQMTQSPSSLSASVGDRVTITCKASQSVSNDVAWYQQKPGKVPKLLIYYASNRYHGVPSRFSGSGSGTDFTLTISSLQPEDVATYFCQQDYSSPWTFGGGTKVEIK

SEQ ID NO: 528 - protein, 107 aa, Artificial Sequence
  source: /note="Description of Artificial Sequence: Synthetic polypeptide"
  source: /note="Light Chain of hSC16.34 IgG histidine scanning variant #16"
DIQMTQSPSSLSASVGDRVTITCKASQSVSNDVAWYQQKPGKVPKLLIYYASNRYSGVPSRFSGSGSGTDFTLTISSLQPEDVATYFCHQDYSSPWTFGGGTKVEIK

SEQ ID NO: 529 - protein, 107 aa, Artificial Sequence
  source: /note="Description of Artificial Sequence: Synthetic polypeptide"
  source: /note="Light Chain of hSC16.34 IgG histidine scanning variant #17"
DIQMTQSPSSLSASVGDRVTITCKASQSVSNDVAWYQQKPGKVPKLLIYYASNRYSGVPSRFSGSGSGTDFTLTISSLQPEDVATYFCQHDYSSPWTFGGGTKVEIK

SEQ ID NO: 530 - protein, 107 aa, Artificial Sequence
  source: /note="Description of Artificial Sequence: Synthetic polypeptide"
  source: /note="Light Chain of hSC16.34 IgG histidine scanning variant #18"
DIQMTQSPSSLSASVGDRVTITCKASQSVSNDVAWYQQKPGKVPKLLIYYASNRYSGVPSRFSGSGSGTDFTLTISSLQPEDVATYFCQQHYSSPWTFGGGTKVEIK

SEQ ID NO: 531 - protein, 107 aa, Artificial Sequence
  source: /note="Description of Artificial Sequence: Synthetic polypeptide"
  source: /note="Light Chain of hSC16.34 IgG histidine scanning variant #19"
DIQMTQSPSSLSASVGDRVTITCKASQSVSNDVAWYQQKPGKVPKLLIYYASNRYSGVPSRFSGSGSGTDFTLTISSLQPEDVATYFCQQDHSSPWTFGGGTKVEIK

SEQ ID NO: 532 - protein, 107 aa, Artificial Sequence
  source: /note="Description of Artificial Sequence: Synthetic polypeptide"
  source: /note="Light Chain of hSC16.34 IgG histidine scanning variant #20"
DIQMTQSPSSLSASVGDRVTITCKASQSVSNDVAWYQQKPGKVPKLLIYYASNRYSGVPSRFSGSGSGTDFTLTISSLQPEDVATYFCQQDYHSPWTFGGGTKVEIK

SEQ ID NO: 533 - protein, 107 aa, Artificial Sequence
  source: /note="Description of Artificial Sequence: Synthetic polypeptide"
  source: /note="Light Chain of hSC16.34 IgG histidine scanning variant #21"
DIQMTQSPSSLSASVGDRVTITCKASQSVSNDVAWYQQKPGKVPKLLIYYASNRYSGVPSRFSGSGSGTDFTLTISSLQPEDVATYFCQQDYSHPWTFGGGTKVEIK

SEQ ID NO: 534 - protein, 107 aa, Artificial Sequence
  source: /note="Description of Artificial Sequence: Synthetic polypeptide"
  source: /note="Light Chain of hSC16.34 IgG histidine scanning variant #22"
DIQMTQSPSSLSASVGDRVTITCKASQSVSNDVAWYQQKPGKVPKLLIYYASNRYSGVPSRFSGSGSGTDFTLTISSLQPEDVATYFCQQDYSSHWTFGGGTKVEIK

SEQ ID NO: 535 - protein, 107 aa, Artificial Sequence
  source: /note="Description of Artificial Sequence: Synthetic polypeptide"
  source: /note="Light Chain of hSC16.34 IgG histidine scanning variant #23"
DIQMTQSPSSLSASVGDRVTITCKASQSVSNDVAWYQQKPGKVPKLLIYYASNRYSGVPSRFSGSGSGTDFTLTISSLQPEDVATYFCQQDYSSPHTFGGGTKVEIK

SEQ ID NO: 536 - protein, 107 aa, Artificial Sequence
  source: /note="Description of Artificial Sequence: Synthetic polypeptide"
  source: /note="Light Chain of hSC16.34 IgG histidine scanning variant #24"
DIQMTQSPSSLSASVGDRVTITCKASQSVSNDVAWYQQKPGKVPKLLIYYASNRYSGVPSRFSGSGSGTDFTLTISSLQPEDVATYFCQQDYSSPWHFGGGTKVEIK

SEQ ID NO: 537 - protein, 117 aa, Artificial Sequence
  source: /note="Description of Artificial Sequence: Synthetic polypeptide"
  source: /note="Heavy Chain of SC16.67 IgG"
EVQLVETGGGLVQPKGSLKLSCAVSAFTFTTYAMNWVRQAPGKGLEWVARIRNKSNNYATYYADSVKDRFTISRDDSQSMLYLQMNNLKIEDTAMYYCVFYYDYVYWGQGTLVTVSA

SEQ ID NO: 538 - protein, 109 aa, Artificial Sequence
  source: /note="Description of Artificial Sequence: Synthetic polypeptide"
  source: /note="Light Chain of SC16.67 IgG"
QAVVTQESALTTSPGETVTLTCRSSTGAVTTSNYANWIQEKPDHLFTGLIGGTNNRAPGVPARFSGSLIGDKAALTITGAQTEDEAIYFCGLWYSNHLVFGGGTKLTVL

SEQ ID NO: 539 - protein, 117 aa, Artificial Sequence
  source: /note="Description of Artificial Sequence: Synthetic polypeptide"
  source: /note="Heavy Chain of SC16.67 IgG histidine scanning variant #1"
EVQLVETGGGLVQPKGSLKLSCAVSHFTFTTYAMNWVRQAPGKGLEWVARIRNKSNNYATYYADSVKDRFTISRDDSQSMLYLQMNNLKIEDTAMYYCVFYYDYVYWGQGTLVTVSA

SEQ ID NO: 540 - protein, 117 aa, Artificial Sequence
  source: /note="Description of Artificial Sequence: Synthetic polypeptide"
  source: /note="Heavy Chain of SC16.67 IgG histidine scanning variant #2"
EVQLVETGGGLVQPKGSLKLSCAVSAHTFTTYAMNWVRQAPGKGLEWVARIRNKSNNYATYYADSVKDRFTISRDDSQSMLYLQMNNLKIEDTAMYYCVFYYDYVYWGQGTLVTVSA

SEQ ID NO: 541 - protein, 117 aa, Artificial Sequence
  source: /note="Description of Artificial Sequence: Synthetic polypeptide"
  source: /note="Heavy Chain of SC16.67 IgG histidine scanning variant #3"
EVQLVETGGGLVQPKGSLKLSCAVSAFHFTTYAMNWVRQAPGKGLEWVARIRNKSNNYATYYADSVKDRFTISRDDSQSMLYLQMNNLKIEDTAMYYCVFYYDYVYWGQGTLVTVSA

SEQ ID NO: 542 - protein, 117 aa, Artificial Sequence
  source: /note="Description of Artificial Sequence: Synthetic polypeptide"
  source: /note="Heavy Chain of SC16.67 IgG histidine scanning variant #4"
EVQLVETGGGLVQPKGSLKLSCAVSAFTHTTYAMNWVRQAPGKGLEWVARIRNKSNNYATYYADSVKDRFTISRDDSQSMLYLQMNNLKIEDTAMYYCVFYYDYVYWGQGTLVTVSA

SEQ ID NO: 543 - protein, 117 aa, Artificial Sequence
  source: /note="Description of Artificial Sequence: Synthetic polypeptide"
  source: /note="Heavy Chain of SC16.67 IgG histidine scanning variant #5"
EVQLVETGGGLVQPKGSLKLSCAVSAFTFHTYAMNWVRQAPGKGLEWVARIRNKSNNYATYYADSVKDRFTISRDDSQSMLYLQMNNLKIEDTAMYYCVFYYDYVYWGQGTLVTVSA

SEQ ID NO: 544 - protein, 117 aa, Artificial Sequence
  source: /note="Description of Artificial Sequence: Synthetic polypeptide"
  source: /note="Heavy Chain of SC16.67 IgG histidine scanning variant #6"
EVQLVETGGGLVQPKGSLKLSCAVSAFTFTHYAMNWVRQAPGKGLEWVARIRNKSNNYATYYADSVKDRFTISRDDSQSMLYLQMNNLKIEDTAMYYCVFYYDYVYWGQGTLVTVSA

SEQ ID NO: 545 - protein, 117 aa, Artificial Sequence
  source: /note="Description of Artificial Sequence: Synthetic polypeptide"
  source: /note="Heavy Chain of SC16.67 IgG histidine scanning variant #7"
EVQLVETGGGLVQPKGSLKLSCAVSAFTFTTHAMNWVRQAPGKGLEWVARIRNKSNNYATYYADSVKDRFTISRDDSQSMLYLQMNNLKIEDTAMYYCVFYYDYVYWGQGTLVTVSA

SEQ ID NO: 546 - protein, 117 aa, Artificial Sequence
  source: /note="Description of Artificial Sequence: Synthetic polypeptide"
  source: /note="Heavy Chain of SC16.67 IgG histidine scanning variant #8"
EVQLVETGGGLVQPKGSLKLSCAVSAFTFTTYHMNWVRQAPGKGLEWVARIRNKSNNYATYYADSVKDRFTISRDDSQSMLYLQMNNLKIEDTAMYYCVFYYDYVYWGQGTLVTVSA

SEQ ID NO: 547 - protein, 117 aa, Artificial Sequence
  source: /note="Description of Artificial Sequence: Synthetic polypeptide"
  source: /note="Heavy Chain of SC16.67 IgG histidine scanning variant #9"
EVQLVETGGGLVQPKGSLKLSCAVSAFTFTTYAHNWVRQAPGKGLEWVARIRNKSNNYATYYADSVKDRFTISRDDSQSMLYLQMNNLKIEDTAMYYCVFYYDYVYWGQGTLVTVSA

SEQ ID NO: 548 - protein, 117 aa, Artificial Sequence
  source: /note="Description of Artificial Sequence: Synthetic polypeptide"
  source: /note="Heavy Chain of SC16.67 IgG histidine scanning variant #10"
EVQLVETGGGLVQPKGSLKLSCAVSAFTFTTYAMHWVRQAPGKGLEWVARIRNKSNNYATYYADSVKDRFTISRDDSQSMLYLQMNNLKIEDTAMYYCVFYYDYVYWGQGTLVTVSA

SEQ ID NO: 549 - protein, 117 aa, Artificial Sequence
  source: /note="Description of Artificial Sequence: Synthetic polypeptide"
  source: /note="Heavy Chain of SC16.67 IgG histidine scanning variant #11"
EVQLVETGGGLVQPKGSLKLSCAVSAFTFTTYAMNWVRQAPGKGLEWVAHIRNKSNNYATYYADSVKDRFTISRDDSQSMLYLQMNNLKIEDTAMYYCVFYYDYVYWGQGTLVTVSA

SEQ ID NO: 550 - protein, 117 aa, Artificial Sequence
  source: /note="Description of Artificial Sequence: Synthetic polypeptide"
  source: /note="Heavy Chain of SC16.67 IgG histidine scanning variant #12"
EVQLVETGGGLVQPKGSLKLSCAVSAFTFTTYAMNWVRQAPGKGLEWVARHRNKSNNYATYYADSVKDRFTISRDDSQSMLYLQMNNLKIEDTAMYYCVFYYDYVYWGQGTLVTVSA

SEQ ID NO: 551 - protein, 117 aa, Artificial Sequence
  source: /note="Description of Artificial Sequence: Synthetic polypeptide"
  source: /note="Heavy Chain of SC16.67 IgG histidine scanning variant #13"
EVQLVETGGGLVQPKGSLKLSCAVSAFTFTTYAMNWVRQAPGKGLEWVARIHNKSNNYATYYADSVKDRFTISRDDSQSMLYLQMNNLKIEDTAMYYCVFYYDYVYWGQGTLVTVSA

SEQ ID NO: 552 - protein, 117 aa, Artificial Sequence
  source: /note="Description of Artificial Sequence: Synthetic polypeptide"
  source: /note="Heavy Chain of SC16.67 IgG histidine scanning variant #14"
EVQLVETGGGLVQPKGSLKLSCAVSAFTFTTYAMNWVRQAPGKGLEWVARIRHKSNNYATYYADSVKDRFTISRDDSQSMLYLQMNNLKIEDTAMYYCVFYYDYVYWGQGTLVTVSA

SEQ ID NO: 553 - protein, 117 aa, Artificial Sequence
  source: /note="Description of Artificial Sequence: Synthetic polypeptide"
  source: /note="Heavy Chain of SC16.67 IgG histidine scanning variant #15"
EVQLVETGGGLVQPKGSLKLSCAVSAFTFTTYAMNWVRQAPGKGLEWVARIRNHSNNYATYYADSVKDRFTISRDDSQSMLYLQMNNLKIEDTAMYYCVFYYDYVYWGQGTLVTVSA

SEQ ID NO: 554 - protein, 117 aa, Artificial Sequence
  source: /note="Description of Artificial Sequence: Synthetic polypeptide"
  source: /note="Heavy Chain of SC16.67 IgG histidine scanning variant #16"
EVQLVETGGGLVQPKGSLKLSCAVSAFTFTTYAMNWVRQAPGKGLEWVARIRNKHNNYATYYADSVKDRFTISRDDSQSMLYLQMNNLKIEDTAMYYCVFYYDYVYWGQGTLVTVSA

SEQ ID NO: 555 - protein, 117 aa, Artificial Sequence
  source: /note="Description of Artificial Sequence: Synthetic polypeptide"
  source: /note="Heavy Chain of SC16.67 IgG histidine scanning variant #17"
EVQLVETGGGLVQPKGSLKLSCAVSAFTFTTYAMNWVRQAPGKGLEWVARIRNKSHNYATYYADSVKDRFTISRDDSQSMLYLQMNNLKIEDTAMYYCVFYYDYVYWGQGTLVTVSA

SEQ ID NO: 556 - protein, 117 aa, Artificial Sequence
  source: /note="Description of Artificial Sequence: Synthetic polypeptide"
  source: /note="Heavy Chain of SC16.67 IgG histidine scanning variant #18"
EVQLVETGGGLVQPKGSLKLSCAVSAFTFTTYAMNWVRQAPGKGLEWVARIRNKSNHYATYYADSVKDRFTISRDDSQSMLYLQMNNLKIEDTAMYYCVFYYDYVYWGQGTLVTVSA

SEQ ID NO: 557 - protein, 117 aa, Artificial Sequence
  source: /note="Description of Artificial Sequence: Synthetic polypeptide"
  source: /note="Heavy Chain of SC16.67 IgG histidine scanning variant #19"
EVQLVETGGGLVQPKGSLKLSCAVSAFTFTTYAMNWVRQAPGKGLEWVARIRNKSNNHATYYADSVKDRFTISRDDSQSMLYLQMNNLKIEDTAMYYCVFYYDYVYWGQGTLVTVSA

SEQ ID NO: 558 - protein, 117 aa, Artificial Sequence
  source: /note="Description of Artificial Sequence: Synthetic polypeptide"
  source: /note="Heavy Chain of SC16.67 IgG histidine scanning variant #20"
EVQLVETGGGLVQPKGSLKLSCAVSAFTFTTYAMNWVRQAPGKGLEWVARIRNKSNNYHTYYADSVKDRFTISRDDSQSMLYLQMNNLKIEDTAMYYCVFYYDYVYWGQGTLVTVSA

SEQ ID NO: 559 - protein, 117 aa, Artificial Sequence
  source: /note="Description of Artificial Sequence: Synthetic polypeptide"
  source: /note="Heavy Chain of SC16.67 IgG histidine scanning variant #21"
EVQLVETGGGLVQPKGSLKLSCAVSAFTFTTYAMNWVRQAPGKGLEWVARIRNKSNNYAHYYADSVKDRFTISRDDSQSMLYLQMNNLKIEDTAMYYCVFYYDYVYWGQGTLVTVSA

SEQ ID NO: 560 - protein, 117 aa, Artificial Sequence
  source: /note="Description of Artificial Sequence: Synthetic polypeptide"
  source: /note="Heavy Chain of SC16.67 IgG histidine scanning variant #22"
EVQLVETGGGLVQPKGSLKLSCAVSAFTFTTYAMNWVRQAPGKGLEWVARIRNKSNNYATHYADSVKDRFTISRDDSQSMLYLQMNNLKIEDTAMYYCVFYYDYVYWGQGTLVTVSA

SEQ ID NO: 561 - protein, 117 aa, Artificial Sequence
  source: /note="Description of Artificial Sequence: Synthetic polypeptide"
  source: /note="Heavy Chain of SC16.67 IgG histidine scanning variant #23"
EVQLVETGGGLVQPKGSLKLSCAVSAFTFTTYAMNWVRQAPGKGLEWVARIRNKSNNYATYHADSVKDRFTISRDDSQSMLYLQMNNLKIEDTAMYYCVFYYDYVYWGQGTLVTVSA

SEQ ID NO: 562 - protein, 117 aa, Artificial Sequence
  source: /note="Description of Artificial Sequence: Synthetic polypeptide"
  source: /note="Heavy Chain of SC16.67 IgG histidine scanning variant #24"
EVQLVETGGGLVQPKGSLKLSCAVSAFTFTTYAMNWVRQAPGKGLEWVARIRNKSNNYATYYHDSVKDRFTISRDDSQSMLYLQMNNLKIEDTAMYYCVFYYDYVYWGQGTLVTVSA

SEQ ID NO: 563 - protein, 117 aa, Artificial Sequence
  source: /note="Description of Artificial Sequence: Synthetic polypeptide"
  source: /note="Heavy Chain of SC16.67 IgG histidine scanning variant #25"
EVQLVETGGGLVQPKGSLKLSCAVSAFTFTTYAMNWVRQAPGKGLEWVARIRNKSNNYATYYAHSVKDRFTISRDDSQSMLYLQMNNLKIEDTAMYYCVFYYDYVYWGQGTLVTVSA

SEQ ID NO: 564 - protein, 117 aa, Artificial Sequence
  source: /note="Description of Artificial Sequence: Synthetic polypeptide"
  source: /note="Heavy Chain of SC16.67 IgG histidine scanning variant #26"
EVQLVETGGGLVQPKGSLKLSCAVSAFTFTTYAMNWVRQAPGKGLEWVARIRNKSNNYATYYADHVKDRFTISRDDSQSMLYLQMNNLKIEDTAMYYCVFYYDYVYWGQGTLVTVSA

SEQ ID NO: 565 - protein, 117 aa, Artificial Sequence
  source: /note="Description of Artificial Sequence: Synthetic polypeptide"
  source: /note="Heavy Chain of SC16.67 IgG histidine scanning variant #27"
EVQLVETGGGLVQPKGSLKLSCAVSAFTFTTYAMNWVRQAPGKGLEWVARIRNKSNNYATYYADSHKDRFTISRDDSQSMLYLQMNNLKIEDTAMYYCVFYYDYVYWGQGTLVTVSA

SEQ ID NO: 566 - protein, 117 aa, Artificial Sequence
  source: /note="Description of Artificial Sequence: Synthetic polypeptide"
  source: /note="Heavy Chain of SC16.67 IgG histidine scanning variant #28"
EVQLVETGGGLVQPKGSLKLSCAVSAFTFTTYAMNWVRQAPGKGLEWVARIRNKSNNYATYYADSVHDRFTISRDDSQSMLYLQMNNLKIEDTAMYYCVFYYDYVYWGQGTLVTVSA

SEQ ID NO: 567 - protein, 117 aa, Artificial Sequence
  source: /note="Description of Artificial Sequence: Synthetic polypeptide"
  source: /note="Heavy Chain of SC16.67 IgG histidine scanning variant #29"
EVQLVETGGGLVQPKGSLKLSCAVSAFTFTTYAMNWVRQAPGKGLEWVARIRNKSNNYATYYADSVKHRFTISRDDSQSMLYLQMNNLKIEDTAMYYCVFYYDYVYWGQGTLVTVSA

SEQ ID NO: 568 - protein, 117 aa, Artificial Sequence
  source: /note="Description of Artificial Sequence: Synthetic polypeptide"
  source: /note="Heavy Chain of SC16.67 IgG histidine scanning variant #30"
EVQLVETGGGLVQPKGSLKLSCAVSAFTFTTYAMNWVRQAPGKGLEWVARIRNKSNNYATYYADSVKDRFTISRDDSQSMLYLQMNNLKIEDTAMYYCHFYYDYVYWGQGTLVTVSA

SEQ ID NO: 569 - protein, 117 aa, Artificial Sequence
  source: /note="Description of Artificial Sequence: Synthetic polypeptide"
  source: /note="Heavy Chain of SC16.67 IgG histidine scanning variant #31"
EVQLVETGGGLVQPKGSLKLSCAVSAFTFTTYAMNWVRQAPGKGLEWVARIRNKSNNYATYYADSVKDRFTISRDDSQSMLYLQMNNLKIEDTAMYYCVHYYDYVYWGQGTLVTVSA

SEQ ID NO: 570 - protein, 117 aa, Artificial Sequence
  source: /note="Description of Artificial Sequence: Synthetic polypeptide"
  source: /note="Heavy Chain of SC16.67 IgG histidine scanning variant #32"
EVQLVETGGGLVQPKGSLKLSCAVSAFTFTTYAMNWVRQAPGKGLEWVARIRNKSNNYATYYADSVKDRFTISRDDSQSMLYLQMNNLKIEDTAMYYCVFHYDYVYWGQGTLVTVSA

SEQ ID NO: 571 - protein, 117 aa, Artificial Sequence
  source: /note="Description of Artificial Sequence: Synthetic polypeptide"
  source: /note="Heavy Chain of SC16.67 IgG histidine scanning variant #33"
EVQLVETGGGLVQPKGSLKLSCAVSAFTFTTYAMNWVRQAPGKGLEWVARIRNKSNNYATYYADSVKDRFTISRDDSQSMLYLQMNNLKIEDTAMYYCVFYHDYVYWGQGTLVTVSA

SEQ ID NO: 572 - protein, 117 aa, Artificial Sequence
  source: /note="Description of Artificial Sequence: Synthetic polypeptide"
  source: /note="Heavy Chain of SC16.67 IgG histidine scanning variant #34"
EVQLVETGGGLVQPKGSLKLSCAVSAFTFTTYAMNWVRQAPGKGLEWVARIRNKSNNYATYYADSVKDRFTISRDDSQSMLYLQMNNLKIEDTAMYYCVFYYHYVYWGQGTLVTVSA

SEQ ID NO: 573 - protein, 117 aa, Artificial Sequence
  source: /note="Description of Artificial Sequence: Synthetic polypeptide"
  source: /note="Heavy Chain of SC16.67 IgG histidine scanning variant #35"
EVQLVETGGGLVQPKGSLKLSCAVSAFTFTTYAMNWVRQAPGKGLEWVARIRNKSNNYATYYADSVKDRFTISRDDSQSMLYLQMNNLKIEDTAMYYCVFYYDHVYWGQGTLVTVSA

SEQ ID NO: 574 - protein, 117 aa, Artificial Sequence
  source: /note="Description of Artificial Sequence: Synthetic polypeptide"
  source: /note="Heavy Chain of SC16.67 IgG histidine scanning variant #36"
EVQLVETGGGLVQPKGSLKLSCAVSAFTFTTYAMNWVRQAPGKGLEWVARIRNKSNNYATYYADSVKDRFTISRDDSQSMLYLQMNNLKIEDTAMYYCVFYYDYHYWGQGTLVTVSA

SEQ ID NO: 575 - protein, 117 aa, Artificial Sequence
  source: /note="Description of Artificial Sequence: Synthetic polypeptide"
  source: /note="Heavy Chain of SC16.67 IgG histidine scanning variant #37"
EVQLVETGGGLVQPKGSLKLSCAVSAFTFTTYAMNWVRQAPGKGLEWVARIRNKSNNYATYYADSVKDRFTISRDDSQSMLYLQMNNLKIEDTAMYYCVFYYDYVHWGQGTLVTVSA

SEQ ID NO: 576 - protein, 109 aa, Artificial Sequence
  source: /note="Description of Artificial Sequence: Synthetic polypeptide"
  source: /note="Light Chain of SC16.67 IgG histidine scanning variant #1"
QAVVTQESALTTSPGETVTLTCHSSTGAVTTSNYANWIQEKPDHLFTGLIGGTNNRAPGVPARFSGSLIGDKAALTITGAQTEDEAIYFCGLWYSNHLVFGGGTKLTVL

SEQ ID NO: 577 - protein, 109 aa, Artificial Sequence
  source: /note="Description of Artificial Sequence: Synthetic polypeptide"
  source: /note="Light Chain of SC16.67 IgG histidine scanning variant #2"
QAVVTQESALTTSPGETVTLTCRHSTGAVTTSNYANWIQEKPDHLFTGLIGGTNNRAPGVPARFSGSLIGDKAALTITGAQTEDEAIYFCGLWYSNHLVFGGGTKLTVL

SEQ ID NO: 578 - protein, 109 aa, Artificial Sequence
  source: /note="Description of Artificial Sequence: Synthetic polypeptide"
  source: /note="Light Chain of SC16.67 IgG histidine scanning variant #3"
QAVVTQESALTTSPGETVTLTCRSHTGAVTTSNYANWIQEKPDHLFTGLIGGTNNRAPGVPARFSGSLIGDKAALTITGAQTEDEAIYFCGLWYSNHLVFGGGTKLTVL

SEQ ID NO: 579 - protein, 109 aa, Artificial Sequence
  source: /note="Description of Artificial Sequence: Synthetic polypeptide"
  source: /note="Light Chain of SC16.67 IgG histidine scanning variant #4"
QAVVTQESALTTSPGETVTLTCRSSHGAVTTSNYANWIQEKPDHLFTGLIGGTNNRAPGVPARFSGSLIGDKAALTITGAQTEDEAIYFCGLWYSNHLVFGGGTKLTVL

SEQ ID NO: 580 - protein, 109 aa, Artificial Sequence
  source: /note="Description of Artificial Sequence: Synthetic polypeptide"
  source: /note="Light Chain of SC16.67 IgG histidine scanning variant #5"
QAVVTQESALTTSPGETVTLTCRSSTHAVTTSNYANWIQEKPDHLFTGLIGGTNNRAPGVPARFSGSLIGDKAALTITGAQTEDEAIYFCGLWYSNHLVFGGGTKLTVL

SEQ ID NO: 581 - protein, 109 aa, Artificial Sequence
  source: /note="Description of Artificial Sequence: Synthetic polypeptide"
  source: /note="Light Chain of SC16.67 IgG histidine scanning variant #6"
QAVVTQESALTTSPGETVTLTCRSSTGHVTTSNYANWIQEKPDHLFTGLIGGTNNRAPGVPARFSGSLIGDKAALTITGAQTEDEAIYFCGLWYSNHLVFGGGTKLTVL

SEQ ID NO: 582 - protein, 109 aa, Artificial Sequence
  source: /note="Description of Artificial Sequence: Synthetic polypeptide"
  source: /note="Light Chain of SC16.67 IgG histidine scanning variant #7"
QAVVTQESALTTSPGETVTLTCRSSTGAHTTSNYANWIQEKPDHLFTGLIGGTNNRAPGVPARFSGSLIGDKAALTITGAQTEDEAIYFCGLWYSNHLVFGGGTKLTVL

SEQ ID NO: 583 - protein, 109 aa, Artificial Sequence
  source: /note="Description of Artificial Sequence: Synthetic polypeptide"
  source: /note="Light Chain of SC16.67 IgG histidine scanning variant #8"
QAVVTQESALTTSPGETVTLTCRSSTGAVHTSNYANWIQEKPDHLFTGLIGGTNNRAPGVPARFSGSLIGDKAALTITGAQTEDEAIYFCGLWYSNHLVFGGGTKLTVL

SEQ ID NO: 584 - protein, 109 aa, Artificial Sequence
  source: /note="Description of Artificial Sequence: Synthetic polypeptide"
  source: /note="Light Chain of SC16.67 IgG histidine scanning variant #9"
QAVVTQESALTTSPGETVTLTCRSSTGAVTHSNYANWIQEKPDHLFTGLIGGTNNRAPGVPARFSGSLIGDKAALTITGAQTEDEAIYFCGLWYSNHLVFGGGTKLTVL

SEQ ID NO: 585 - protein, 109 aa, Artificial Sequence
  source: /note="Description of Artificial Sequence: Synthetic polypeptide"
  source: /note="Light Chain of SC16.67 IgG histidine scanning variant #10"
QAVVTQESALTTSPGETVTLTCRSSTGAVTTHNYANWIQEKPDHLFTGLIGGTNNRAPGVPARFSGSLIGDKAALTITGAQTEDEAIYFCGLWYSNHLVFGGGTKLTVL

SEQ ID NO: 586 - protein, 109 aa, Artificial Sequence
  source: /note="Description of Artificial Sequence: Synthetic polypeptide"
  source: /note="Light Chain of SC16.67 IgG histidine scanning variant #11"
QAVVTQESALTTSPGETVTLTCRSSTGAVTTSHYANWIQEKPDHLFTGLIGGTNNRAPGVPARFSGSLIGDKAALTITGAQTEDEAIYFCGLWYSNHLVFGGGTKLTVL

SEQ ID NO: 587 - protein, 109 aa, Artificial Sequence
  source: /note="Description of Artificial Sequence: Synthetic polypeptide"
  source: /note="Light Chain of SC16.67 IgG histidine scanning variant #12"
QAVVTQESALTTSPGETVTLTCRSSTGAVTTSNHANWIQEKPDHLFTGLIGGTNNRAPGVPARFSGSLIGDKAALTITGAQTEDEAIYFCGLWYSNHLVFGGGTKLTVL

SEQ ID NO: 588 - protein, 109 aa, Artificial Sequence
  source: /note="Description of Artificial Sequence: Synthetic polypeptide"
  source: /note="Light Chain of SC16.67 IgG histidine scanning variant #13"
QAVVTQESALTTSPGETVTLTCRSSTGAVTTSNYHNWIQEKPDHLFTGLIGGTNNRAPGVPARFSGSLIGDKAALTITGAQTEDEAIYFCGLWYSNHLVFGGGTKLTVL

SEQ ID NO: 589 - protein, 109 aa, Artificial Sequence
  source: /note="Description of Artificial Sequence: Synthetic polypeptide"
  source: /note="Light Chain of SC16.67 IgG histidine scanning variant #14"
QAVVTQESALTTSPGETVTLTCRSSTGAVTTSNYAHWIQEKPDHLFTGLIGGTNNRAPGVPARFSGSLIGDKAALTITGAQTEDEAIYFCGLWYSNHLVFGGGTKLTVL

SEQ ID NO: 590 - protein, 109 aa, Artificial Sequence
  source: /note="Description of Artificial Sequence: Synthetic polypeptide"
  source: /note="Light Chain of SC16.67 IgG histidine scanning variant #15"
QAVVTQESALTTSPGETVTLTCRSSTGAVTTSNYANWIQEKPDHLFTGLIGHTNNRAPGVPARFSGSLIGDKAALTITGAQTEDEAIYFCGLWYSNHLVFGGGTKLTVL

SEQ ID NO: 591 - protein, 109 aa, Artificial Sequence
  source: /note="Description of Artificial Sequence: Synthetic polypeptide"
  source: /note="Light Chain of SC16.67 IgG histidine scanning variant #16"
QAVVTQESALTTSPGETVTLTCRSSTGAVTTSNYANWIQEKPDHLFTGLIGGHNNRAPGVPARFSGSLIGDKAALTITGAQTEDEAIYFCGLWYSNHLVFGGGTKLTVL

SEQ ID NO: 592 - protein, 109 aa, Artificial Sequence
  source: /note="Description of Artificial Sequence: Synthetic polypeptide"
  source: /note="Light Chain of SC16.67 IgG histidine scanning variant #17"
QAVVTQESALTTSPGETVTLTCRSSTGAVTTSNYANWIQEKPDHLFTGLIGGTHNRAPGVPARFSGSLIGDKAALTITGAQTEDEAIYFCGLWYSNHLVFGGGTKLTVL

SEQ ID NO: 593 - protein, 109 aa, Artificial Sequence
  source: /note="Description of Artificial Sequence: Synthetic polypeptide"
  source: /note="Light Chain of SC16.67 IgG histidine scanning variant #18"
QAVVTQESALTTSPGETVTLTCRSSTGAVTTSNYANWIQEKPDHLFTGLIGGTNHRAPGVPARFSGSLIGDKAALTITGAQTEDEAIYFCGLWYSNHLVFGGGTKLTVL

SEQ ID NO: 594 - protein, 109 aa, Artificial Sequence
  source: /note="Description of Artificial Sequence: Synthetic polypeptide"
  source: /note="Light Chain of SC16.67 IgG histidine scanning variant #19"
QAVVTQESALTTSPGETVTLTCRSSTGAVTTSNYANWIQEKPDHLFTGLIGGTNNHAPGVPARFSGSLIGDKAALTITGAQTEDEAIYFCGLWYSNHLVFGGGTKLTVL

SEQ ID NO: 595 - protein, 109 aa, Artificial Sequence
  source: /note="Description of Artificial Sequence: Synthetic polypeptide"
  source: /note="Light Chain of SC16.67 IgG histidine scanning variant #20"
QAVVTQESALTTSPGETVTLTCRSSTGAVTTSNYANWIQEKPDHLFTGLIGGTNNRHPGVPARFSGSLIGDKAALTITGAQTEDEAIYFCGLWYSNHLVFGGGTKLTVL

SEQ ID NO: 596 - protein, 109 aa, Artificial Sequence
  source: /note="Description of Artificial Sequence: Synthetic polypeptide"
  source: /note="Light Chain of SC16.67 IgG histidine scanning variant #21"
QAVVTQESALTTSPGETVTLTCRSSTGAVTTSNYANWIQEKPDHLFTGLIGGTNNRAHGVPARFSGSLIGDKAALTITGAQTEDEAIYFCGLWYSNHLVFGGGTKLTVL

SEQ ID NO: 597 - protein, 109 aa, Artificial Sequence
  source: /note="Description of Artificial Sequence: Synthetic polypeptide"
  source: /note="Light Chain of SC16.67 IgG histidine scanning variant #22"
QAVVTQESALTTSPGETVTLTCRSSTGAVTTSNYANWIQEKPDHLFTGLIGGTNNRAPGVPARFSGSLIGDKAALTITGAQTEDEAIYFCHLWYSNHLVFGGGTKLTVL

SEQ ID NO: 598 - protein, 109 aa, Artificial Sequence
  source: /note="Description of Artificial Sequence: Synthetic polypeptide"
  source: /note="Light Chain of SC16.67 IgG histidine scanning variant #23"
QAVVTQESALTTSPGETVTLTCRSSTGAVTTSNYANWIQEKPDHLFTGLIGGTNNRAPGVPARFSGSLIGDKAALTITGAQTEDEAIYFCGHWYSNHLVFGGGTKLTVL

SEQ ID NO: 599 - protein, 109 aa, Artificial Sequence
  source: /note="Description of Artificial Sequence: Synthetic polypeptide"
  source: /note="Light Chain of SC16.67 IgG histidine scanning variant #24"
QAVVTQESALTTSPGETVTLTCRSSTGAVTTSNYANWIQEKPDHLFTGLIGGTNNRAPGVPARFSGSLIGDKAALTITGAQTEDEAIYFCGLHYSNHLVFGGGTKLTVL

SEQ ID NO: 600 - protein, 109 aa, Artificial Sequence
  source: /note="Description of Artificial Sequence: Synthetic polypeptide"
  source: /note="Light Chain of SC16.67 IgG histidine scanning variant #25"
QAVVTQESALTTSPGETVTLTCRSSTGAVTTSNYANWIQEKPDHLFTGLIGGTNNRAPGVPARFSGSLIGDKAALTITGAQTEDEAIYFCGLWHSNHLVFGGGTKLTVL

SEQ ID NO: 601 - protein, 109 aa, Artificial Sequence
  source: /note="Description of Artificial Sequence: Synthetic polypeptide"
  source: /note="Light Chain of SC16.67 IgG histidine scanning variant #26"
QAVVTQESALTTSPGETVTLTCRSSTGAVTTSNYANWIQEKPDHLFTGLIGGTNNRAPGVPARFSGSLIGDKAALTITGAQTEDEAIYFCGLWYHNHLVFGGGTKLTVL

SEQ ID NO: 602 - protein, 109 aa, Artificial Sequence
  source: /note="Description of Artificial Sequence: Synthetic polypeptide"
  source: /note="Light Chain of SC16.67 IgG histidine scanning variant #27"
QAVVTQESALTTSPGETVTLTCRSSTGAVTTSNYANWIQEKPDHLFTGLIGGTNNRAPGVPARFSGSLIGDKAALTITGAQTEDEAIYFCGLWYSHHLVFGGGTKLTVL

SEQ ID NO: 603 - protein, 109 aa, Artificial Sequence
  source: /note="Description of Artificial Sequence: Synthetic polypeptide"
  source: /note="Light Chain of SC16.67 IgG histidine scanning variant #28"
QAVVTQESALTTSPGETVTLTCRSSTGAVTTSNYANWIQEKPDHLFTGLIGGTNNRAPGVPARFSGSLIGDKAALTITGAQTEDEAIYFCGLWYSNALVFGGGTKLTVL

SEQ ID NO: 604 - protein, 109 aa, Artificial Sequence
  source: /note="Description of Artificial Sequence: Synthetic polypeptide"
  source: /note="Light Chain of SC16.67 IgG histidine scanning variant #29"
QAVVTQESALTTSPGETVTLTCRSSTGAVTTSNYANWIQEKPDHLFTGLIGGTNNRAPGVPARFSGSLIGDKAALTITGAQTEDEAIYFCGLWYSNHHVFGGGTKLTVL

SEQ ID NO: 605 - protein, 109 aa, Artificial Sequence
  source: /note="Description of Artificial Sequence: Synthetic polypeptide"
  source: /note="Light Chain of SC16.67 IgG histidine scanning variant #30"
QAVVTQESALTTSPGETVTLTCRSSTGAVTTSNYANWIQEKPDHLFTGLIGGTNNRAPGVPARFSGSLIGDKAALTITGAQTEDEAIYFCGLWYSNHLHFGGGTKLTVL

SEQ ID NO: 606 - protein, 123 aa, Artificial Sequence
  source: /note="Description of Artificial Sequence: Synthetic polypeptide"
  source: /note="Humanized VH variant #1"
EVQLVESGGGLVQPGGSLRLSCAASGFNISYYYIGWVRRAPGKGEELVARIYPTNGYTRYADSVKGRFTISADTSKNTAYLQMNSLRAEDTAVYYCARAYGDSDHYSEAIDYSGQGTLVTVSS

SEQ ID NO: 607 - protein, 126 aa, Artificial Sequence
  source: /note="Description of Artificial Sequence: Synthetic polypeptide"
  source: /note="Humanized VH variant #2"
EVQLVESGGGLVQPGGSLRLSCAASGFNIYSESIGWVRRAPGKGEELVARIYPTNGYTRYADSVKGRFTISADTSKNTAYLQMNSLRAEDTAVYYCARSYYSHYDGHYHYYGLDYSGQGTLVTVSS

SEQ ID NO: 608 - protein, 129 aa, Artificial Sequence
  source: /note="Description of Artificial Sequence: Synthetic polypeptide"
  source: /note="Humanized VH variant #3"
EVQLVESGGGLVQPGGSLRLSCAASGFNISYYSIGWVRRAPGKGEELVARIYPTNGYTRYADSVKGRFTISADTSKNTAYLQMNSLRAEDTAVYYCARYHHSEYSDYYGYYSEYGFDYSGQGTLVTVRS

SEQ ID NO: 609 - protein, 126 aa, Artificial Sequence
  source: /note="Description of Artificial Sequence: Synthetic polypeptide"
  source: /note="Humanized VH variant #4"
EVQLVESGGGLVQPGGSLRLSCAASGFNIYSYSIGWVRRAPGKGEELVARIYPTNGYTRYADSVKGRFTISADTSKNTAYLQMNSLRAEDTAVYYCAREHYHGYYDGAHYYALDYSGQGTLVTVSS

SEQ ID NO: 610 - protein, 126 aa, Artificial Sequence
  source: /note="Description of Artificial Sequence: Synthetic polypeptide"
  source: /note="Humanized VH variant #5"
EVQLVESGGGLVQPGGSLRLSCAASGFNIEYYSIGWVRRAPGKGEELVARIYPTNGYTRYADSVKGRFTISADTSKNTAYLQMNSLRAEDTAVYYCAREYYSYHDEYEYDYALDYSGQGTLVTVSS

SEQ ID NO: 611 - protein, 126 aa, Artificial Sequence
  source: /note="Description of Artificial Sequence: Synthetic polypeptide"
  source: /note="Humanized VH variant #6"
EVQLVESGGGLVQPGGSLRLSCAASGFNIEHYSIGWVRRAPGKGEELVARIYPTNGYTRYADSVKGRFTISADTSKNTAYLQMNSLRAEDTAVYYCARHHYYGYHSGYHHYAIDYSGQGTLVTVSS

SEQ ID NO: 612 - protein, 126 aa, Artificial Sequence
  source: /note="Description of Artificial Sequence: Synthetic polypeptide"
  source: /note="Humanized VH variant #7"
EVQLVESGGGLVQPGGSLRLSCAASGFNISSSDIGWVRRAPGKGEELVARIYPTNGYTRYADSVKGRFTISADTSKNTAYLQMNSLRAEDTAVYYCARYYYYDDDGYYYEHAIDYSGQGTLVTVSS

SEQ ID NO: 613 - protein, 126 aa, Artificial Sequence
  source: /note="Description of Artificial Sequence: Synthetic polypeptide"
  source: /note="Humanized VH variant #8"
EVQLVESGGGLVQPGGSLRLSCAASGFNIEYESIGWVRRAPGKGEELVARIYPTNGYTRYADSVKGRFTISADTSKNTAYLQMNSLRAEDTAVYYCARSEYSHYSGSHHYYALDYSGQGTLVTVSS

SEQ ID NO: 614 - protein, 126 aa, Artificial Sequence
  source: /note="Description of Artificial Sequence: Synthetic polypeptide"
  source: /note="Humanized VH variant #9"
EVQLVESGGGLVQPGGSLRLSCAASGFNISEHSIGWVRRAPGKGEELVARIYPTNGYTRYADSVKGRFTISADTSKNTAYLQMNSLRAEDTAVYYCARSYYHGYSHGHHYYAIDYSGQGTLVTVSS

SEQ ID NO: 615 - protein, 129 aa, Artificial Sequence
  source: /note="Description of Artificial Sequence: Synthetic polypeptide"
  source: /note="Humanized VH variant #10"
EVQLVESGGGLVQPGGSLRLSCAASGFNIHSYYIGWVRRAPGKGEELVARIYPTNGYTRYADSVKGRFTISADTSKNTAYLQMNSLRAEDTAVYYCARGYYGHEYDYHYDYYGGGFDYSGQGTLVTVSS

SEQ ID NO: 616 - protein, 122 aa, Artificial Sequence
  source: /note="Description of Artificial Sequence: Synthetic polypeptide"
  source: /note="Humanized VH variant #11"
EVQLVESGGGLVQPGGSLRLSCAASGFNIHYEEIGWVRRAPGKGEELVARIYPTNGYTRYADSVKGRFTISADTSKNTAYLQMNSLRAEDTAVYYCARYSYYYHYGGGMDYSGQGTLVTVSS

SEQ ID NO: 617 - protein, 122 aa, Artificial Sequence
  source: /note="Description of Artificial Sequence: Synthetic polypeptide"
  source: /note="Humanized VH variant #12"
EVQLVESGGLVQPGGSLRLSCAASGFNIESSYIGWVRRAPGKGEELVARIYPTNGYTRYADSVKGRFTISADTSKNTAYLQMNSLRAEDTAVYYCARYDEYDGYYYEAMDYSGQGTLVTVSS

SEQ ID NO: 618 - protein, 126 aa, Artificial Sequence
  source: /note="Description of Artificial Sequence: Synthetic polypeptide"
  source: /note="Humanized VH variant #13"
EVQLVESGGGLVQPGGSLRLSCAASGFNISEESIGWVRRAPGKGEELVARIYPTNGYTRYADSVKGRFTISADTSKNTAYLQMNSLRAEDTAVYYCARSYYAHYSAGYYYYALDYSGQGTLVTVSS

SEQ ID NO: 619 - protein, 126 aa, Artificial Sequence
  source: /note="Description of Artificial Sequence: Synthetic polypeptide"
  source: /note="Humanized VH variant #14"
EVQLVESGGGLVQPGGSLRLSCAASGFNISHYSIGWVRHAPGKGEELVARIYPTNGYTRYADSVKGRFTISADTSKNTAYLQMNSLRAEDTAVYYCARHHYSHYDGHSHYYGLDYSGQGTLVTVSS

SEQ ID NO: 620 - protein, 126 aa, Artificial Sequence
  source: /note="Description of Artificial Sequence: Synthetic polypeptide"
  source: /note="Humanized VH variant #15"
EVQLVESGGGLVQPGGSLRLSCAASGFNIYDHSIGWVRRAPGKGEELVARIYPTNGYTRYADSVKGRFTISADTSKNTAYLQMNSLRAEDTAVYYCARSSYSGYYGSHHYYALDYSGQGTLVTVSS

SEQ ID NO: 621 - protein, 107 aa, Artificial Sequence [sequence omitted]

SEQ ID NO: 622 - protein, 10 aa, Artificial Sequence
  source: /note="Description of Artificial Sequence: Synthetic peptide"
  source: /note="Heavy Chain CDR1 of SC16.4 IgG"
GYTFTDYSMH

SEQ ID NO: 623 - protein, 17 aa, Artificial Sequence
  source: /note="Description of Artificial Sequence: Synthetic peptide"
  source: /note="Heavy Chain CDR2 of SC16.4 IgG"
WINTETGEPGYADDFKG

SEQ ID NO: 624 - protein, 10 aa, Artificial Sequence
  source: /note="Description of Artificial Sequence: Synthetic peptide"
  source: /note="Heavy Chain CDR3 of SC16.4 IgG"
ARYDGYAMDY

SEQ ID NO: 625 - protein, 11 aa, Artificial Sequence
  source: /note="Description of Artificial Sequence: Synthetic peptide"
  source: /note="Light Chain CDR1 of SC16.4 IgG"
RASQDISNYLN

SEQ ID NO: 626 - protein, 7 aa, Artificial Sequence
  source: /note="Description of Artificial Sequence: Synthetic peptide"
  source: /note="Light Chain CDR2 of SC16.4 IgG"
YTSRLHS

SEQ ID NO: 627 - protein, 9 aa, Artificial Sequence
  source: /note="Description of Artificial Sequence: Synthetic peptide"
  source: /note="Light Chain CDR3 of SC16.4 IgG"
QQGDMLPWT

SEQ ID NO: 628 - protein, 12 aa, Artificial Sequence
  source: /note="Description of Artificial Sequence: Synthetic peptide"
  source: /note="Heavy Chain CDR1 of hSC16.13 IgG"
GFSLSTSGMGVG

SEQ ID NO: 629 - protein, 16 aa, Artificial Sequence
  source: /note="Description of Artificial Sequence: Synthetic peptide"
  source: /note="Heavy Chain CDR2 of hSC16.13 IgG"
HIWWDDVKRYSPSLKS

SEQ ID NO: 630 - protein, 16 aa, Artificial Sequence
  source: /note="Description of Artificial Sequence: Synthetic peptide"
  source: /note="Heavy Chain CDR3 of hSC16.13 IgG"
ARIVSFDNDVVSAMDY

SEQ ID NO: 631 - protein, 10 aa, Artificial Sequence
  source: /note="Description of Artificial Sequence: Synthetic peptide"
  source: /note="Light Chain CDR1 of hSC16.13 IgG"
SASSSVSYMY

SEQ ID NO: 632 - protein, 7 aa, Artificial Sequence
  source: /note="Description of Artificial Sequence: Synthetic peptide"
  source: /note="Light Chain CDR2 of hSC16.13 IgG"
LTSNLAS

SEQ ID NO: 633 - protein, 9 aa, Artificial Sequence
  source: /note="Description of Artificial Sequence: Synthetic peptide"
  source: /note="Light Chain CDR3 of hSC16.13 IgG"
QQWRSNPFT

SEQ ID NO: 634 - protein, 13 aa, Artificial Sequence
  source: /note="Description of Artificial Sequence: Synthetic peptide"
  source: /note="Heavy Chain CDR1 of hSC16.15 IgG"
KASGYTFTRYWIH

SEQ ID NO: 635 - protein, 17 aa, Artificial Sequence
  source: /note="Description of Artificial Sequence: Synthetic peptide"
  source: /note="Heavy Chain CDR2 of hSC16.15 IgG"
YINPTTVYTEFNQNFKD

SEQ ID NO: 636 - protein, 10 aa, Artificial Sequence
  source: /note="Description of Artificial Sequence: Synthetic peptide"
  source: /note="Heavy Chain CDR3 of hSC16.15 IgG"
ARGGSNFFDY

SEQ ID NO: 637 - protein, 8 aa, Artificial Sequence
  source: /note="Description of Artificial Sequence: Synthetic peptide"
  source: /note="Light Chain CDR1 of hSC16.15 IgG"
ENIYYNLA

SEQ ID NO: 638 - protein, 7 aa, Artificial Sequence
  source: /note="Description of Artificial Sequence: Synthetic peptide"
  source: /note="Light Chain CDR2 of hSC16.15 IgG"
TANSLED

SEQ ID NO: 639 - protein, 9 aa, Artificial Sequence
  source: /note="Description of Artificial Sequence: Synthetic peptide"
  source: /note="Light Chain CDR3 of hSC16.15 IgG"
KQAYDVPPT

SEQ ID NO: 640 - protein, 12 aa, Artificial Sequence
  source: /note="Description of Artificial Sequence: Synthetic peptide"
  source: /note="Heavy Chain CDR1 of hSC16.25 IgG"
GFSLSTSGMGVG

SEQ ID NO: 641 - protein, 16 aa, Artificial Sequence
  source: /note="Description of Artificial Sequence: Synthetic peptide"
  source: /note="Heavy Chain CDR2 of hSC16.25 IgG"
DIWWDDNKYYNPSLKS

SEQ ID NO: 642 - protein, 16 aa, Artificial Sequence
  source: /note="Description of Artificial Sequence: Synthetic peptide"
  source: /note="Heavy Chain CDR3 of hSC16.25 IgG"
ARRVNYYYDPYYAMDY

SEQ ID NO: 643 - protein, 7 aa, Artificial Sequence
  source: /note="Description of Artificial Sequence: Synthetic peptide"
  source: /note="Light Chain CDR1 of hSC16.25 IgG"
SSVSYMH

SEQ ID NO: 644 - protein, 7 aa, Artificial Sequence
  source: /note="Description of Artificial Sequence: Synthetic peptide"
  source: /note="Light Chain CDR2 of hSC16.25 IgG"
DSSKLAS

SEQ ID NO: 645 - protein, 9 aa, Artificial Sequence
  source: /note="Description of Artificial Sequence: Synthetic peptide"
  source: /note="Light Chain CDR3 of hSC16.25 IgG"
QQWSSNPLT

SEQ ID NO: 646 - protein, 13 aa, Artificial Sequence
  source: /note="Description of Artificial Sequence: Synthetic peptide"
  source: /note="Heavy Chain CDR1 of hSC16.34 IgG"
KASGYTFTNYGMN

SEQ ID NO: 647 - protein, 17 aa, Artificial Sequence
  source: /note="Description of Artificial Sequence: Synthetic peptide"
  source: /note="Heavy Chain CDR2 of hSC16.34 IgG"
WINTYTGDPTYADDFKG

SEQ ID NO: 648 - protein, 11 aa, Artificial Sequence
  source: /note="Description of Artificial Sequence: Synthetic peptide"
  source: /note="Heavy Chain CDR3 of hSC16.34 IgG"
ARIGGNSPSDY

SEQ ID NO: 649 - protein, 8 aa, Artificial Sequence
  source: /note="Description of Artificial Sequence: Synthetic peptide"
  source: /note="Light Chain CDR1 of hSC16.34 IgG"
QSVSNDVA

SEQ ID NO: 650 - protein, 7 aa, Artificial Sequence
  source: /note="Description of Artificial Sequence: Synthetic peptide"
  source: /note="Light Chain CDR2 of hSC16.34 IgG"
YASNRYS

SEQ ID NO: 651 - protein, 9 aa, Artificial Sequence
  source: /note="Description of Artificial Sequence: Synthetic peptide"
  source: /note="Light Chain CDR3 of hSC16.34 IgG"
QQDYSSPWT

SEQ ID NO: 652 - protein, 10 aa, Artificial Sequence
  source: /note="Description of Artificial Sequence: Synthetic peptide"
  source: /note="Heavy Chain CDR1 of SC16.67 IgG"
AFTFTTYAMN

SEQ ID NO: 653 - protein, 19 aa, Artificial Sequence
  source: /note="Description of Artificial Sequence: Synthetic peptide"
  source: /note="Heavy Chain CDR2 of SC16.67 IgG"
RIRNKSNNYATYYADSVKD

SEQ ID NO: 654 - protein, 8 aa, Artificial Sequence
  source: /note="Description of Artificial Sequence: Synthetic peptide"
  source: /note="Heavy Chain CDR3 of SC16.67 IgG"
VFYYDYVY

SEQ ID NO: 655 - protein, 14 aa, Artificial Sequence
  source: /note="Description of Artificial Sequence: Synthetic peptide"
  source: /note="Light Chain CDR1 of SC16.67 IgG"
RSSTGAVTTSNYAN

SEQ ID NO: 656 - protein, 7 aa, Artificial Sequence
  source: /note="Description of Artificial Sequence: Synthetic peptide"
  source: /note="Light Chain CDR2 of SC16.67 IgG"
GTNNRAP

SEQ ID NO: 657 - protein, 9 aa, Artificial Sequence
  source: /note="Description of Artificial Sequence: Synthetic peptide"
  source: /note="Light Chain CDR3 of SC16.67 IgG"
GLWYSNHLV

1. A pharmaceutical composition comprising an effective amount of an antigen-binding protein construct (ABPC) comprising:
a first antigen-binding domain that is capable of specifically binding DLL3 or an epitope of DLL3 presented on the surface of a target mammalian cell,
wherein:
(a) the dissociation rate of the first antigen-binding domain at a pH of about 4.0 to about 6.5 is faster than the dissociation rate at a pH of about 7.0 to about 8.0; or
(b) the dissociation constant (KD) of the first antigen-binding domain at a pH of about 4.0 to about 6.5 is greater than the KD at a pH of about 7.0 to about 8.0.

2. The pharmaceutical composition of claim 1, wherein the ABPC is degraded in the target mammalian cell following internalization of the ABPC by the target mammalian cell.

3. The pharmaceutical composition of claim 1, wherein the ABPC further comprises a conjugated toxin, radioisotope, drug, or small molecule.

4. A pharmaceutical composition comprising an effective amount of an antigen-binding protein construct (ABPC) comprising:
a first antigen-binding domain that is capable of specifically binding DLL3 or an epitope of DLL3 presented on the surface of a target mammalian cell; and
a conjugated toxin, radioisotope, drug, or small molecule,
wherein:
(a) the dissociation rate of the first antigen-binding domain at a pH of about 4.0 to about 6.5 is faster than the dissociation rate at a pH of about 7.0 to about 8.0; or
the dissociation constant (KD) of the first antigen-binding domain at a pH of about 4.0 to about 6.5 is greater than the KD at a pH of about 7.0 to about 8.0; and
(b) the composition provides for one or more of:
an increase in toxin liberation in the target mammalian cell as compared to a composition comprising the same amount of a control ABPC;
an increase in target mammalian cell killing as compared to a composition comprising the same amount of a control ABPC; and
an increase in endolysosomal delivery in the target mammalian cell as compared to a composition comprising the same amount of a control ABPC.

5. The pharmaceutical composition of claim 1, wherein the first antigen-binding domain comprises one of (a) though (g):
(a) a heavy chain variable domain of rovalpituzumab with one or more amino acids substituted with a histidine, wherein the heavy chain variable domain of rovalpituzumab comprises SEQ ID NO: 1; and/or
a light chain variable domain of rovalpituzumab with one or more amino acids substituted with a histidine, wherein the light chain variable domain of rovalpituzumab comprises SEQ ID NO: 2;
(b) a heavy chain variable domain of SC16.4 with one or more amino acids substituted with a histidine, wherein the heavy chain variable domain of SC16.4 comprises SEQ ID NO: 119; and/or
a light chain variable domain of SC16.4 with one or more amino acids substituted with a histidine, wherein the light chain variable domain of SC16.4 comprises SEQ ID NO: 120;
(c) a heavy chain variable domain of SC16.13 with one or more amino acids substituted with a histidine, wherein the heavy chain variable domain of SC16.13 comprises SEQ ID NO: 236; and/or
a light chain variable domain of SC16.13 with one or more amino acids substituted with a histidine, wherein the light chain variable domain of SC16.13 comprises SEQ ID NO: 237;
(d) a heavy chain variable domain of SC16.15 with one or more amino acids substituted with a histidine, wherein the heavy chain variable domain of SC16.15 comprises SEQ ID NO: 335; and/or
a light chain variable domain of SC16.15 with one or more amino acids substituted with a histidine, wherein the light chain variable domain of SC16.15 comprises SEQ ID NO: 336;
(e) a heavy chain variable domain of SC16.25 with one or more amino acids substituted with a histidine, wherein the heavy chain variable domain of SC16.25 comprises SEQ ID NO: 401; and/or
a light chain variable domain of SC16.25 with one or more amino acids substituted with a histidine, wherein the light chain variable domain of SC16.25 comprises SEQ ID NO: 402;
(f) a heavy chain variable domain of SC16.34 with one or more amino acids substituted with a histidine, wherein the heavy chain variable domain of SC16.34 comprises SEQ ID NO: 470; and/or
a light chain variable domain of SC16.34 with one or more amino acids substituted with a histidine, wherein the light chain variable domain of SC16.34 comprises SEQ ID NO: 471; and
(g) a heavy chain variable domain of SC16.67 with one or more amino acids substituted with a histidine, wherein the heavy chain variable domain of SC16.67 comprises SEQ ID NO: 537; and/or
a light chain variable domain of SC16.67 with one or more amino acids substituted with a histidine, wherein the light chain variable domain of SC16.67 comprises SEQ ID NO: 538.

6. The pharmaceutical composition of claim 1, wherein the first DLL3-binding domain comprises one of (a) through (g):
(a) a heavy chain variable domain comprising a CDR1, a CDR2, and a CDR3 of SEQ ID NOs: 3-5, respectively, with collectively a total of one or more amino acid positions in SEQ ID NOs: 3-5 substituted with a histidine; and/or
a light chain variable domain comprising a CDR1, a CDR2, and a CDR3 of SEQ ID NOs: 6-8, respectively, with collectively a total of one or more amino acid positions in SEQ ID NOs: 6-8 substituted with a histidine;
(b) a heavy chain variable domain comprising a CDR1, a CDR2, and a CDR3 of SEQ ID NOs: 622-624, respectively, with collectively a total of one or more amino acid positions in SEQ ID NOs: 622-624 substituted with a histidine; and/or
a light chain variable domain comprising a CDR1, a CDR2, and a CDR3 of SEQ ID NOs: 625-627, respectively, with collectively a total of one or more amino acid positions in SEQ ID NOs: 625-627 substituted with a histidine;
(c) a heavy chain variable domain comprising a CDR1, a CDR2, and a CDR3 of SEQ ID NOs: 628-630, respectively, with collectively a total of one or more amino acid positions in SEQ ID NOs: 628-630 substituted with a histidine; and/or
a light chain variable domain comprising a CDR1, a CDR2, and a CDR3 of SEQ ID NOs: 631-633, respectively, with collectively a total of one or more amino acid positions in SEQ ID NOs: 631-633 substituted with a histidine;
(d) a heavy chain variable domain comprising a CDR1, a CDR2, and a CDR3 of SEQ ID NOs: 634-636, respectively, with collectively a total of one or more amino acid positions in SEQ ID NOs: 634-636 substituted with a histidine; and/or
a light chain variable domain comprising a CDR1, a CDR2, and a CDR3 of SEQ ID NOs: 637-639, respectively, with collectively a total of one or more amino acid positions in SEQ ID NOs: 637-639 substituted with a histidine;
(e) a heavy chain variable domain comprising a CDR1, a CDR2, and a CDR3 of SEQ ID NOs: 640-642, respectively, with collectively a total of one or more amino acid positions in SEQ ID NOs: 640-642 substituted with a histidine; and/or
a light chain variable domain comprising a CDR1, a CDR2, and a CDR3 of SEQ ID NOs: 643-645, respectively, with collectively a total of one or more amino acid positions in SEQ ID NOs: 643-645 substituted with a histidine;
(f) a heavy chain variable domain comprising a CDR1, a CDR2, and a CDR3 of SEQ ID NOs: 646-648, respectively, with collectively a total of one or more amino acid positions in SEQ ID NOs: 646-648 substituted with a histidine; and/or
a light chain variable domain comprising a CDR1, a CDR2, and a CDR3 of SEQ ID NOs: 649-651, respectively, with collectively a total of one or more amino acid positions in SEQ ID NOs: 649-651 substituted with a histidine; and
(g) a heavy chain variable domain comprising a CDR1, a CDR2, and a CDR3 of SEQ ID NOs: 652-654, respectively, with collectively a total of one or more amino acid positions in SEQ ID NOs: 652-654 substituted with a histidine; and/or
a light chain variable domain comprising a CDR1, a CDR2, and a CDR3 of SEQ ID NOs: 655-657, respectively, with collectively a total of one or more amino acid positions in SEQ ID NOs: 655-657 substituted with a histidine.

7. The pharmaceutical composition of claim 1, wherein the first antigen-binding domain comprises one of (a) through (g):
(a) a heavy chain variable domain that is at least 90% identical to SEQ ID NO: 1, wherein the heavy chain variable domain includes a histidine at one or more positions in SEQ ID NO: 1 selected from the group consisting of: 27, 29, 31, 32, 34, 35, 50, 53, 54, 55, 58, 97, 98, 101, 103, 105, and 106; and/or
a light chain variable domain that is at least 90% identical to SEQ ID NO: 2, wherein the light chain variable domain includes a histidine at one or more positions in SEQ ID NO: 2 selected from the group consisting of: 25, 26, 29, 32, 33, 34, 51, 54, 89, 90, 93, 94, 95, and 96;
(b) a heavy chain variable domain that is at least 90% identical to SEQ ID NO: 119, wherein the heavy chain variable domain includes a histidine at one or more positions in SEQ ID NO: 119 selected from the group consisting of: 32, 50, 52, 53, 57, 58, 59, 60, 62, 64, 65, 97, 98, 99, 100, 102, 104, and 105; and/or
a light chain variable domain that is at least 90% identical to SEQ ID NO: 120, wherein the light chain variable domain includes a histidine at one or more positions in SEQ ID NO: 120 selected from the group consisting of: 29, 32, 34, 91, 92, 93, 94 and 96;
(c) a heavy chain variable domain that is at least 90% identical to SEQ ID NO: 236, wherein the heavy chain variable domain includes a histidine at one or more positions in SEQ ID NO: 236 selected from the group consisting of: 27, 29, 31, 33, 34, 35, 36, 37, 54, 55, 56, 58, 60, 98, 100, 102, 106, 108, and 110; and/or
a light chain variable domain that is at least 90% identical to SEQ ID NO: 237, wherein the light chain variable domain includes a histidine at one or more positions in SEQ ID NO: 237 selected from the group consisting of 25, 29, 32, 33, 49, 50, 90, 91, 93, and 95;
(d) a heavy chain variable domain that is at least 90% identical to SEQ ID NO: 335, wherein the heavy chain variable domain includes a histidine at one or more positions in SEQ ID NO: 335 selected from the group consisting of: 27, 32, 33, 34, 50, 98, 101, 102, 103, 104, and 105; and/or
a light chain variable domain that is at least 90% identical to SEQ ID NO: 336, wherein the light chain variable domain includes a histidine at one or more positions in SEQ ID NO: 336 selected from the group consisting of: 27, 29, 32, 34, 52, 53, 89, 90, 91, 92, 93, 94, and 96;
(e) a heavy chain variable domain that is at least 90% identical to SEQ ID NO: 401, wherein the heavy chain variable domain includes a histidine at one or more positions in SEQ ID NO: 401 selected from the group consisting of: 27, 101, 103, 104, 108, and 109; and/or
a light chain variable domain that is at least 90% identical to SEQ ID NO: 402, wherein the light chain variable domain includes a histidine at one or more positions in SEQ ID NO: 402 selected from the group consisting of: 30 and 31;
(f) a heavy chain variable domain that is at least 90% identical to SEQ ID NO: 470, wherein the heavy chain variable domain includes a histidine at one or more positions in SEQ ID NO: 470 selected from the group consisting of 24, 27, 29, 32, 34, 35, 50, 51, 53, 54, 56, 58, 59, 60, 63, 98, 101, 103, 105, 106, and 107; and/or
a light chain variable domain that is at least 90% identical to SEQ ID NO: 471, wherein the light chain variable domain includes a histidine at one or more positions in SEQ ID NO: 471 selected from the group consisting of: 29, 32, 33, 34, 50, 51, 53, 55, 89, 92, 94, 96 and 97; and
(g) a heavy chain variable domain that is at least 90% identical to SEQ ID NO: 537, wherein the heavy chain variable domain includes a histidine at one or more positions in SEQ ID NO: 537 selected from the group consisting of: 26, 29, 31, 32, 53, 54, 57, 58, 59, 65, 67, 68, 103, 104, and 106; and/or
a light chain variable domain that is at least 90% identical to SEQ ID NO: 538, wherein the light chain variable domain includes a histidine at one or more positions in SEQ ID NO: 538 selected from the group consisting of: 28, 34, 53, 93, 94, and 98.

8. The pharmaceutical composition of claim 1, wherein the first antigen-binding domain comprises one of (a) through (g):
(a) a light chain variable domain of SEQ ID NO: 2, SEQ ID NO: 55, SEQ ID NO: 56, SEQ ID NO: 59, SEQ ID NO: 62, SEQ ID NO: 63, SEQ ID NO: 64, SEQ ID NO: 65, SEQ ID NO: 66, SEQ ID NO: 69, SEQ ID NO: 72, SEQ ID NO: 73, SEQ ID NO: 76, SEQ ID NO: 77, SEQ ID NO: 78, SEQ ID NO: 79, SEQ ID NO: 99, SEQ ID NO: 100, SEQ ID NO: 101, SEQ ID NO: 102, SEQ ID NO: 103, SEQ ID NO: 104, SEQ ID NO: 105, SEQ ID NO: 106, SEQ ID NO: 107, SEQ ID NO: 108, SEQ ID NO: 109, SEQ ID NO: 110, SEQ ID NO: 111, SEQ ID NO: 112, SEQ ID NO: 113, SEQ ID NO: 114, SEQ ID NO: 115, SEQ ID NO: 116, SEQ ID NO: 117, or SEQ ID NO: 118, and/or
a heavy chain variable domain of SEQ ID NO: 1, SEQ ID NO: 17, SEQ ID NO: 19, SEQ ID NO: 21, SEQ ID NO: 22, SEQ ID NO: 24, SEQ ID NO: 25, SEQ ID NO: 26, SEQ ID NO: 29, SEQ ID NO: 30, SEQ ID NO: 31, SEQ ID NO: 34, SEQ ID NO: 43, SEQ ID NO: 44, SEQ ID NO: 47, SEQ ID NO: 49, SEQ ID NO: 51, SEQ ID NO: 52, SEQ ID NO: 81, SEQ ID NO: 82, SEQ ID NO: 83, SEQ ID NO: 84, SEQ ID NO: 85, SEQ ID NO: 86, SEQ ID NO: 87, SEQ ID NO: 88, SEQ ID NO: 89, SEQ ID NO: 90, SEQ ID NO: 91, SEQ ID NO: 92, SEQ ID NO: 93, SEQ ID NO: 94, SEQ ID NO: 95, SEQ ID NO: 96, SEQ ID NO: 97, or SEQ ID NO: 98,
wherein the first antigen-binding domain does not comprise (i) a light chain variable domain of SEQ ID NO: 2 and a heavy chain variable domain of SEQ ID NO: 1; (ii) a light chain variable domain of SEQ ID NO: 2 and heavy chain variable domain that is not one of SEQ ID NOs: 17, 19, 21, 22, 24-26, 29-31, 34, 43, 44, 47, 49, 51, 52, and 81-98; or (iii) a heavy chain variable domain of SEQ ID NO: 1 and a light chain variable domain that is not one of SEQ ID NOs: 55, 56, 59, 62-66, 69, 72, 73, 76-79, and 99-118;
(b) a light chain variable domain of SEQ ID NO: 120, SEQ ID NO: 163, SEQ ID NO: 166, SEQ ID NO: 168, SEQ ID NO: 178, SEQ ID NO: 179, SEQ ID NO: 180, SEQ ID NO: 181, SEQ ID NO: 183, SEQ ID NO: 226, SEQ ID NO: 227, SEQ ID NO: 228, SEQ ID NO: 229, SEQ ID NO: 230, SEQ ID NO: 231, SEQ ID NO: 232, SEQ ID NO: 233, SEQ ID NO: 234, or SEQ ID NO: 235, and/or
a heavy chain variable domain of SEQ ID NO: 119, SEQ ID NO: 127, SEQ ID NO: 130, SEQ ID NO: 131, SEQ ID NO: 133, SEQ ID NO: 134, SEQ ID NO: 138, SEQ ID NO: 139, SEQ ID NO: 140, SEQ ID NO: 141, SEQ ID NO: 143, SEQ ID NO: 145, SEQ ID NO: 146, SEQ ID NO: 148, SEQ ID NO: 149, SEQ ID NO: 150, SEQ ID NO: 151, SEQ ID NO: 153, SEQ ID NO: 155, SEQ ID NO: 156; SEQ ID NO: 185, SEQ ID NO: 186, SEQ ID NO: 187, SEQ ID NO: 188, SEQ ID NO: 189, SEQ ID NO: 190, SEQ ID NO: 191, SEQ ID NO: 192, SEQ ID NO: 193, SEQ ID NO: 194, SEQ ID NO: 195, SEQ ID NO: 196, SEQ ID NO: 197, SEQ ID NO: 198, SEQ ID NO: 199, SEQ ID NO: 200, SEQ ID NO: 201, SEQ ID NO: 202, SEQ ID NO: 203, SEQ ID NO: 204, SEQ ID NO: 205, SEQ ID NO: 206, SEQ ID NO: 207, SEQ ID NO: 208, SEQ ID NO: 209, SEQ ID NO: 210, SEQ ID NO: 211, SEQ ID NO: 212, SEQ ID NO: 213, SEQ ID NO: 214, SEQ ID NO: 216, SEQ ID NO: 217, SEQ ID NO: 218, SEQ ID NO: 220, SEQ ID NO: 221, or SEQ ID NO: 223,
wherein the first antigen-binding domain does not comprise (i) a light chain variable domain of SEQ ID NO: 120 and a heavy chain variable domain of SEQ ID NO: 119; (ii) a light chain variable domain of SEQ ID NO: 120 and heavy chain variable domain that is not one of SEQ ID NOs: 127, 130, 131, 133, 134, 138-141, 143, 145, 146, 148-151, 153, 155, 156, 185-214, 216-218, 220, 221, and 223; or (iii) a heavy chain variable domain of SEQ ID NO: 119 and a light chain variable domain that is not one of SEQ ID NOs: 163, 166, 168, 178-181, 183, and 226-235;
(c) a light chain variable domain of SEQ ID NO: 237, SEQ ID NO: 283, SEQ ID NO: 287, SEQ ID NO: 290, SEQ ID NO: 291, SEQ ID NO: 292, SEQ ID NO: 293, SEQ ID NO: 301, SEQ ID NO: 302, SEQ ID NO: 304, SEQ ID NO: 306, or SEQ ID NO: 334, and/or
a heavy chain variable domain of SEQ ID NO: 236, SEQ ID NO: 239, SEQ ID NO: 241, SEQ ID NO: 243, SEQ ID NO: 245, SEQ ID NO: 246, SEQ ID NO: 247, SEQ ID NO: 248, SEQ ID NO: 249, SEQ ID NO: 250, SEQ ID NO: 252, SEQ ID NO: 253, SEQ ID NO: 254, SEQ ID NO: 256, SEQ ID NO: 258, SEQ ID NO: 266, SEQ ID NO: 268, SEQ ID NO: 270, SEQ ID NO: 274, SEQ ID NO: 276, SEQ ID NO: 278, SEQ ID NO: 308, SEQ ID NO: 309, SEQ ID NO: 310, SEQ ID NO: 311, SEQ ID NO: 312, SEQ ID NO: 313, SEQ ID NO: 314, SEQ ID NO: 315, SEQ ID NO: 316, SEQ ID NO: 317, SEQ ID NO: 318, SEQ ID NO: 319, SEQ ID NO: 320, SEQ ID NO: 321, SEQ ID NO: 322, SEQ ID NO: 323, SEQ ID NO: 324, SEQ ID NO: 325, SEQ ID NO: 326, SEQ ID NO: 327, SEQ ID NO: 328, SEQ ID NO: 330, SEQ ID NO: 331, or SEQ ID NO: 332,
wherein the first antigen-binding domain does not comprise (i) a light chain variable domain of SEQ ID NO: 237 and a heavy chain variable domain of SEQ ID NO: 236; (ii) a light chain variable domain of SEQ ID NO: 237 and heavy chain variable domain that is not one of SEQ ID NOs: 239, 241, 243, 245-250, 252-254, 256, 258, 266, 268, 270, 274, 276, 278, 308-328, and 330-332; or (iii) a heavy chain variable domain of SEQ ID NO: 236 and a light chain variable domain that is not one of SEQ ID NOs: 283, 287, 290-293, 301, 302, 304, 306, and 334;
(d) a light chain variable domain of SEQ ID NO: 336, SEQ ID NO: 377, SEQ ID NO: 379, SEQ ID NO: 382, SEQ ID NO: 384, SEQ ID NO: 387, SEQ ID NO: 388, SEQ ID NO: 392, SEQ ID NO: 393, SEQ ID NO: 394, SEQ ID NO: 395, SEQ ID NO: 396, SEQ ID NO: 397, or SEQ ID NO: 399, and/or
a heavy chain variable domain of SEQ ID NO: 335, SEQ ID NO: 341, SEQ ID NO: 346, SEQ ID NO: 347, SEQ ID NO: 348, SEQ ID NO: 349, SEQ ID NO: 350, SEQ ID NO: 368, SEQ ID NO: 371, SEQ ID NO: 372, SEQ ID NO: 373, SEQ ID NO: 374, or SEQ ID NO: 375,
wherein the first antigen-binding domain does not comprise (i) a light chain variable domain of SEQ ID NO: 336 and a heavy chain variable domain of SEQ ID NO: 335; (ii) a light chain variable domain of SEQ ID NO: 336 and heavy chain variable domain that is not one of SEQ ID NOs: 341, 346-350, 368, and 371-375; or (iii) a heavy chain variable domain of SEQ ID NO: 335 and a light chain variable domain that is not one of SEQ ID NOs: 377, 379, 382, 384, 387, 388, 392-397, and 399;
(e) a light chain variable domain of SEQ ID NO: 402, SEQ ID NO: 450, or SEQ ID NO: 451, and/or
a heavy chain variable domain of SEQ ID NO: 401, SEQ ID NO: 404, SEQ ID NO: 434, SEQ ID NO: 436, SEQ ID NO: 437, SEQ ID NO: 441, or SEQ ID NO: 442,
wherein the first antigen-binding domain does not comprise (i) a light chain variable domain of SEQ ID NO: 402 and a heavy chain variable domain of SEQ ID NO: 401; (ii) a light chain variable domain of SEQ ID NO: 402 and heavy chain variable domain that is not one of SEQ ID NOs: 404, 434, 436, 437, 441, and 442; or (iii) a heavy chain variable domain of SEQ ID NO: 401 and a light chain variable domain that is not one of SEQ ID NO: 450 or 451;
(f) a light chain variable domain of SEQ ID NO: 471, SEQ ID NO: 515, SEQ ID NO: 518, SEQ ID NO: 519, SEQ ID NO: 520, SEQ ID NO: 521, SEQ ID NO: 522, SEQ ID NO: 524, SEQ ID NO: 526, SEQ ID NO: 528, SEQ ID NO: 531, SEQ ID NO: 533, SEQ ID NO: 535, or SEQ ID NO: 536, and/or
a heavy chain variable domain of SEQ ID NO: 470, SEQ ID NO: 473, SEQ ID NO: 476, SEQ ID NO: 478, SEQ ID NO: 481, SEQ ID NO: 483, SEQ ID NO: 484, SEQ ID NO: 485, SEQ ID NO: 486, SEQ ID NO: 488, SEQ ID NO: 489, SEQ ID NO: 491, SEQ ID NO: 493, SEQ ID NO: 494, SEQ ID NO: 495, SEQ ID NO: 498, SEQ ID NO: 503, SEQ ID NO: 506, SEQ ID NO: 508, SEQ ID NO: 510, SEQ ID NO: 511, or SEQ ID NO: 512,
wherein the first antigen-binding domain does not comprise (i) a light chain variable domain of SEQ ID NO: 471 and a heavy chain variable domain of SEQ ID NO: 470; (ii) a light chain variable domain of SEQ ID NO: 471 and heavy chain variable domain that is not one of SEQ ID NOs: 473, 476, 478, 481, 483-486, 488, 489, 491, 493-495, 498, 503, 506, 508, and 510-512; or (iii) a heavy chain variable domain of SEQ ID NO: 470 and a light chain variable domain that is not one of SEQ ID NOs: 515, 518-522, 524, 526, 528, 531, 533, 535, and 536; and
(g) a light chain variable domain of SEQ ID NO: 538, SEQ ID NO: 581, SEQ ID NO: 587, SEQ ID NO: 591, SEQ ID NO: 599, SEQ ID NO: 600, or SEQ ID NO: 604, and/or a heavy chain variable domain of SEQ ID NO: 537, SEQ ID NO: 539, SEQ ID NO: 542, SEQ ID NO: 544, SEQ ID NO: 545, SEQ ID NO: 552, SEQ ID NO: 553, SEQ ID NO: 556, SEQ ID NO: 557, SEQ ID NO: 558, SEQ ID NO: 564, SEQ ID NO: 566, SEQ ID NO: 567, SEQ ID NO: 572, SEQ ID NO: 573, or SEQ ID NO: 575,
wherein the first antigen-binding domain does not comprise (i) a light chain variable domain of SEQ ID NO: 538 and a heavy chain variable domain of SEQ ID NO: 537; (ii) a light chain variable domain of SEQ ID NO: 538 and heavy chain variable domain that is not one of SEQ ID NOs: 539, 542, 544, 545, 552, 553, 556-558, 564, 566, 567, 572, 573, and 575; or (iii) a heavy chain variable domain of SEQ ID NO: 537 and a light chain variable domain that is not one of SEQ ID NOs: 581, 587, 591, 599, 600, and 604.

9. The pharmaceutical composition of claim 1, wherein the composition provides for:
an increase in toxin liberation in the target mammalian cell as compared to a composition comprising the same amount of a control ABPC; and/or
an increase in target mammalian cell killing as compared to a composition comprising the same amount of a control ABPC.

10. The pharmaceutical composition of claim 1, wherein the composition provides for an increase in endolysosomal delivery in the target mammalian cell as compared to a composition comprising the same amount of a control ABPC.

11. The pharmaceutical composition of claim 1, wherein the composition:
results in a less of a reduction in the level of DLL3 presented on the surface of the target mammalian cell as compared to a composition comprising the same amount of a control ABPC; or
does not result in a detectable reduction in the level of DLL3 presented on the surface of the target mammalian cell.

12. The pharmaceutical composition of claim 1, wherein the target mammalian cell is a cancer cell.

13. The pharmaceutical composition of claim 1, wherein the ABPC is cytotoxic or cytostatic to the target mammalian cell.

14. (canceled)

15. The pharmaceutical composition of claim 1, wherein the ABPC comprises a single polypeptide.

16. The pharmaceutical composition of claim 15, wherein the antigen-binding domain is selected from the group consisting of: a VH domain, a VHH domain, a VNAR domain, and a scFv.

17. The pharmaceutical composition of claim 1, wherein the ABPC comprises two or more polypeptides.

18. The pharmaceutical composition of claim 17, wherein the ABPC is an antibody.

19. The pharmaceutical composition of claim 1, wherein the half-life of the ABPC in vivo is decreased as compared to the half-life of a control ABPC in vivo.

20. The pharmaceutical composition of claim 1, wherein the ABPC further comprises a second antigen-binding domain.

21. An antigen-binding protein construct (ABPC) comprising:
a first antigen-binding domain that is capable of specifically binding DLL3 or an epitope of DLL3 presented on the surface of a target mammalian cell,
wherein:
(a) the dissociation rate of the first antigen-binding domain at a pH of about 4.0 to about 6.5 is faster than the dissociation rate at a pH of about 7.0 to about 8.0; or
(b) the dissociation constant (KD) of the first antigen-binding domain at a pH of about 4.0 to about 6.5 is greater than the KD at a pH of about 7.0 to about 8.0.

22.-23. (canceled)

24. An antigen-binding protein construct (ABPC) comprising:
a first antigen-binding domain that is capable of specifically binding DLL3 or an epitope of DLL3 presented on the surface of a target mammalian cell; and
a conjugated toxin, radioisotope, drug, or small molecule,
wherein:
(a) the dissociation rate of the first antigen-binding domain at a pH of about 4.0 to about 6.5 is faster than the dissociation rate at a pH of about 7.0 to about 8.0; or
the dissociation constant (KD) of the first antigen-binding domain at a pH of about 4.0 to about 6.5 is greater than the KD at a pH of about 7.0 to about 8.0; and
(b) the composition provides for one or more of:
an increase in toxin liberation in the target mammalian cell as compared to a composition comprising the same amount of a control ABPC;
an increase in target mammalian cell killing as compared to a composition comprising the same amount of a control ABPC; and
an increase in endolysosomal delivery in the target mammalian cell as compared to a composition comprising the same amount of a control ABPC.

25.-40. (canceled)

41. A kit comprising at least one dose of the pharmaceutical composition of claim 1.

42. A method of treating a cancer characterized by having a population of cancer cells that have DLL3 or an epitope of DLL3 presented on their surface, the method comprising:
administering a therapeutically effective amount of the pharmaceutical composition of claim 1 to a subject identified as having a cancer characterized by having the population of cancer cells.

43. A method of reducing the volume of a tumor in a subject, wherein the tumor is characterized by having a population of cancer cells that have DLL3 or an epitope of DLL3 presented on their surface, the method comprising:
administering a therapeutically effective amount of the pharmaceutical composition of claim 1 to a subject identified as having a cancer characterized by having the population of cancer cells.

44. A method of inducing cell death in a cancer cell in a subject, wherein the cancer cell has DLL3 or an epitope of DLL3 presented on its surface, wherein the method comprises:
administering a therapeutically effective amount of the pharmaceutical composition of claim 1 to a subject identified as having a cancer characterized by having a population of the cancer cells.

45. A method of decreasing the risk of developing a metastasis or decreasing the risk of developing an additional metastasis in a subject having a cancer, wherein the cancer is characterized by having a population of cancer cells that have DLL3 or an epitope of DLL3 presented on their surface the method comprising:
administering a therapeutically effective amount of the pharmaceutical composition of claim 1 to a subject identified as having a cancer characterized by having the population of cancer cells.
